United States Patent Application Publication US 2026/0297139 A1, published October 1, 2026 (application 19/476,454).

The application's sequence listing, which the Patent Office published only in electronic form, follows.

SEQUENCE LISTING (6426 sequences)

SEQ ID NO: 1 - protein, 743 aa, synthetic construct
MAADGYLPDWLEDNLSEGIREWWALKPGAPQPKANQQHQDNARGLVLPGYKYLGPGNGLDKGEPVNAADAAALEHDKAYDQQLKAGDNPYLKYNHADAEFQERLKEDTSFGGNLGRAVFQAKKRLLEPLGLVEEAAKTAPGKKRPVEQSPQEPDSSAGIGKSGAQPAKKRLNFGQTGDTESVPDPQPIGEPPAAPSGVGSLTMASGGGAPVADNNEGADGVGSSSGNWHCDSQWLGDRVITTSTRTWALPTYNNHLYKQISNSTSGGSSNDNAYFGYSTPWGYFDFNRFHCHFSPRDWQRLINNNWGFRPKRLNFKLFNIQVKEVTDNNGVKTIANNLTSTVQVFTDSDYQLPYVLGSAHEGCLPPFPADVFMIPQYGYLTLNDGSQAVGRSSFYCLEYFPSQMLRTGNNFQFSYEFENVPFHSSYAHSQSLDRLMNPLIDQYLYYLSKTINGSGQNQQTLKFSVAGPSNMAVQGRNYIPGPSYRQQRVSTTVTQNNNSEFAWPGASSWALNGRNSLMNPGPAMASHKEGEDRFFPLSGSLIFGKQGTGRDNVDADKVMITNEEEIKTTNPVATESYGQVATNHQSDGTLAVPFKAQAQTGWVQNQGILPGMVWQDRDVYLQGPIWAKIPHTDGNFHPSPLMGGFGMKHPPPQILIKNTPVPADPPTAFNKDKLNSFITQYSTGQVSVEIEWELQKENSKRWNPEIQYTSNYYKSNNVEFAVNTEGVYSEPRPIGTRYLTRNL

SEQ ID NO: 2 - protein, 6 aa, synthetic construct
HDSPHK

SEQ ID NO: 3 - DNA, 18 bp, synthetic construct
  source 1..18: mol_type = other DNA
cacgacagcccacacaaa

SEQ ID NO: 4 - DNA, 2226 bp, synthetic construct
  source 1..2226: mol_type = other DNA
atggctgccgatggttatcttccagattggctcgaggacaaccttagtgaaggaattcgcgagtggtgggctttgaaacctggagcccctcaacccaaggcaaatcaacaacatcaagacaacgctcgaggtcttgtgcttccgggttacaaataccttggacccggcaacggactcgacaagggggagccggtcaacgcagcagacgcggcggccctcgagcacgacaaggcctacgaccagcagctcaaggccggagacaacccgtacctcaagtacaaccacgccgacgccgagttccaggagcggctcaaagaagatacgtcttttgggggcaacctcgggcgagcagtcttccaggccaaaaagaggcttcttgaacctcttggtctggttgaggaagcggctaagacggctcctggaaagaagaggcctgtagagcagtctcctcaggaaccggactcctccgcgggtattggcaaatcgggtgcacagcccgctaaaaagagactcaatttcggtcagactggcgacacagagtcagtcccagaccctcaaccaatcggagaacctcccgcagccccctcaggtgtgggatctcttacaatggcttcaggtggtggcgcaccagtggcagacaataacgaaggtgccgatggagtgggtagttcctcgggaaattggcattgcgattcccaatggctgggggacagagtcatcaccaccagcacccgaacctgggccctgcccacctacaacaatcacctctacaagcaaatctccaacagcacatctggaggatcttcaaatgacaacgcctacttcggctacagcaccccctgggggtattttgacttcaacagattccactgccacttctcaccacgtgactggcagcgactcatcaacaacaactggggattccggcctaagcgactcaacttcaagctcttcaacattcaggtcaaagaggttacggacaacaatggagtcaagaccatcgccaataaccttaccagcacggtccaggtcttcacggactcagactatcagctcccgtacgtgctcgggtcggctcacgagggctgcctcccgccgttcccagcggacgttttcatgattcctcagtacgggtatctgacgcttaatgatggaagccaggccgtgggtcgttcgtccttttactgcctggaatatttcccgtcgcaaatgctaagaacgggtaacaacttccagttcagctacgagtttgagaacgtacctttccatagcagctacgctcacagccaaagcctggaccgactaatgaatccactcatcgaccaatacttgtactatctctctaagactgagaatgtgagcgggagccctcatagcaaggctcagaatcagcagactctaaaattcagtgtggccggacccagcaacatggctgtccagggaagaaactacatacctggacccagctaccgacaacaacgtgtctcaaccactgtgactcaaaacaacaacagcgaatttgcttggcctggagcttcttcttgggctctcaatggacgtaatagcttgatgaatcctggacctgctatggccagccacaaagaaggagaggaccgtttctttcctttgtctggatctttaatttttggcaaacaaggaactggaagagacaacgtggatgcggacaaagtcatgataaccaacgaagaagaaattaaaactactaacccggtagcaacggagtcctatggacaagtggccacaaaccaccagagtgcccaagcacaggcgcagaccggctgggttcaaaaccaaggaatacttccgggtatggtttggcaggacagagatgtgtacctgcaaggacccatttgggccaaaattcctcacacggacggcaactttcacccttctccgctgatgggagggtttggaatgaagcacccgcctcctcagatcctcatcaaaaacacacctgtacctgcggatcctccaacggccttcaacaaggacaagctgaactctttcatcacccagtattctactggccaagtcagcgtggagatcgagtgggagctgcagaaggaaaacagcaagcgctggaacccggagatccagtacacttccaactattacaagtctaataatgttgaatttgctgttaatactgaaggtgtatatagtgaaccccgccccattggcaccagatacctgactcgtaatctg

SEQ ID NO: 5 - protein, 742 aa, synthetic construct
MAADGYLPDWLEDNLSEGIREWWALKPGAPQPKANQQHQDNARGLVLPGYKYLGPGNGLDKGEPVNAADAAALEHDKAYDQQLKAGDNPYLKYNHADAEFQERLKEDTSFGGNLGRAVFQAKKRLLEPLGLVEEAAKTAPGKKRPVEQSPQEPDSSAGIGKSGAQPAKKRLNFGQTGDTESVPDPQPIGEPPAAPSGVGSLTMASGGGAPVADNNEGADGVGSSSGNWHCDSQWLGDRVITTSTRTWALPTYNNHLYKQISNSTSGGSSNDNAYFGYSTPWGYFDFNRFHCHFSPRDWQRLINNNWGFRPKRLNFKLFNIQVKEVTDNNGVKTIANNLTSTVQVFTDSDYQLPYVLGSAHEGCLPPFPADVFMIPQYGYLTLNDGSQAVGRSSFYCLEYFPSQMLRTGNNFQFSYEFENVPFHSSYAHSQSLDRLMNPLIDQYLYYLSKTENVSGSPHSKAQNQQTLKFSVAGPSNMAVQGRNYIPGPSYRQQRVSTTVTQNNNSEFAWPGASSWALNGRNSLMNPGPAMASHKEGEDRFFPLSGSLIFGKQGTGRDNVDADKVMITNEEEIKTTNPVATESYGQVATNHQSAQAQAQTGWVQNQGILPGMVWQDRDVYLQGPIWAKIPHTDGNFHPSPLMGGFGMKHPPPQILIKNTPVPADPPTAFNKDKLNSFITQYSTGQVSVEIEWELQKENSKRWNPEIQYTSNYYKSNNVEFAVNTEGVYSEPRPIGTRYLTRNL

SEQ ID NO: 6 - protein, 742 aa, synthetic construct
MAADGYLPDWLEDNLSEGIREWWALKPGAPQPKANQQHQDNARGLVLPGYKYLGPGNGLDKGEPVNAADAAALEHDKAYDQQLKAGDNPYLKYNHADAEFQERLKEDTSFGGNLGRAVFQAKKRLLEPLGLVEEAAKTAPGKKRPVEQSPQEPDSSAGIGKSGAQPAKKRLNFGQTGDTESVPDPQPIGEPPAAPSGVGSLTMASGGGAPVADNNEGADGVGSSSGNWHCDSQWLGDRVITTSTRTWALPTYNNHLYKQISNSTSGGSSNDNAYFGYSTPWGYFDFNRFHCHFSPRDWQRLINNNWGFRPKRLNFKLFNIQVKEVTDNNGVKTIANNLTSTVQVFTDSDYQLPYVLGSAHEGCLPPFPADVFMIPQYGYLTLNDGSQAVGRSSFYCLEYFPSQMLRTGNNFQFSYEFENVPFHSSYAHSQSLDRLMNPLIDQYLYYLSKTEKVSGSPHSKAQNQQTLKFSVAGPSNMAVQGRNYIPGPSYRQQRVSTTVTQNNNSEFAWPGASSWALNGRNSLMNPGPAMASHKEGEDRFFPLSGSLIFGKQGTGRDNVDADKVMITNEEEIKTTNPVATESYGQVATNHQSAQAQAQTGWVQNQGILPGMVWQDRDVYLQGPIWAKIPHTDGNFHPSPLMGGFGMKHPPPQILIKNTPVPADPPTAFNKDKLNSFITQYSTGQVSVEIEWELQKENSKRWNPEIQYTSNYYKSNNVEFAVNTEGVYSEPRPIGTRYLTRNL

SEQ ID NO: 7 - protein, 742 aa, synthetic construct
MAADGYLPDWLEDNLSEGIREWWALKPGAPQPKANQQHQDNARGLVLPGYKYLGPGNGLDKGEPVNAADAAALEHDKAYDQQLKAGDNPYLKYNHADAEFQERLKEDTSFGGNLGRAVFQAKKRLLEPLGLVEEAAKTAPGKKRPVEQSPQEPDSSAGIGKSGAQPAKKRLNFGQTGDTESVPDPQPIGEPPAAPSGVGSLTMASGGGAPVADNNEGADGVGSSSGNWHCDSQWLGDRVITTSTRTWALPTYNNHLYKQISNSTSGGSSNDNAYFGYSTPWGYFDFNRFHCHFSPRDWQRLINNNWGFRPKRLNFKLFNIQVKEVTDNNGVKTIANNLTSTVQVFTDSDYQLPYVLGSAHEGCLPPFPADVFMIPQYGYLTLNDGSQAVGRSSFYCLEYFPSQMLRTGNNFQFSYEFENVPFHSSYAHSQSLDRLMNPLIDQYLYYLSKTINGSGSPHKSGQNKTSLKFSVAGPSNMAVQGRNYIPGPSYRQQRVSTTVTQNNNSEFAWPGASSWALNGRNSLMNPGPAMASHKEGEDRFFPLSGSLIFGKQGTGRDNVDADKVMITNEEEIKTTNPVATESYGQVATNHQSAQAQAQTGWVQNQGILPGMVWQDRDVYLQGPIWAKIPHTDGNFHPSPLMGGFGMKHPPPQILIKNTPVPADPPTAFNKDKLNSFITQYSTGQVSVEIEWELQKENSKRWNPEIQYTSNYYKSNNVEFAVNTEGVYSEPRPIGTRYLTRNL

SEQ ID NO: 8 - protein, 742 aa, synthetic construct
MAADGYLPDWLEDNLSEGIREWWALKPGAPQPKANQQHQDNARGLVLPGYKYLGPGNGLDKGEPVNAADAAALEHDKAYDQQLKAGDNPYLKYNHADAEFQERLKEDTSFGGNLGRAVFQAKKRLLEPLGLVEEAAKTAPGKKRPVEQSPQEPDSSAGIGKSGAQPAKKRLNFGQTGDTESVPDPQPIGEPPAAPSGVGSLTMASGGGAPVADNNEGADGVGSSSGNWHCDSQWLGDRVITTSTRTWALPTYNNHLYKQISNSTSGGSSNDNAYFGYSTPWGYFDFNRFHCHFSPRDWQRLINNNWGFRPKRLNFKLFNIQVKEVTDNNGVKTIANNLTSTVQVFTDSDYQLPYVLGSAHEGCLPPFPADVFMIPQYGYLTLNDGSQAVGRSSFYCLEYFPSQMLRTGNNFQFSYEFENVPFHSSYAHSQSLDRLMNPLIDQYLYYLSKTSNASGSPHSKAHNQQTLKFSVAGPSNMAVQGRNYIPGPSYRQQRVSTTVTQNNNSEFAWPGASSWALNGRNSLMNPGPAMASHKEGEDRFFPLSGSLIFGKQGTGRDNVDADKVMITNEEEIKTTNPVATESYGQVATNHQSAQAQAQTGWVQNQGILPGMVWQDRDVYLQGPIWAKIPHTDGNFHPSPLMGGFGMKHPPPQILIKNTPVPADPPTAFNKDKLNSFITQYSTGQVSVEIEWELQKENSKRWNPEIQYTSNYYKSNNVEFAVNTEGVYSEPRPIGTRYLTRNL

SEQ ID NO: 9 - protein, 742 aa, synthetic construct
MAADGYLPDWLEDNLSEGIREWWALKPGAPQPKANQQHQDNARGLVLPGYKYLGPGNGLDKGEPVNAADAAALEHDKAYDQQLKAGDNPYLKYNHADAEFQERLKEDTSFGGNLGRAVFQAKKRLLEPLGLVEEAAKTAPGKKRPVEQSPQEPDSSAGIGKSGAQPAKKRLNFGQTGDTESVPDPQPIGEPPAAPSGVGSLTMASGGGAPVADNNEGADGVGSSSGNWHCDSQWLGDRVITTSTRTWALPTYNNHLYKQISNSTSGGSSNDNAYFGYSTPWGYFDFNRFHCHFSPRDWQRLINNNWGFRPKRLNFKLFNIQVKEVTDNNGVKTIANNLTSTVQVFTDSDYQLPYVLGSAHEGCLPPFPADVFMIPQYGYLTLNDGSQAVGRSSFYCLEYFPSQMLRTGNNFQFSYEFENVPFHSSYAHSQSLDRLMNPLIDQYLYYLSKNSIGSGSPHSKAQNQQTLKFSVAGPSNMAVQGRNYIPGPSYRQQRVSTTVTQNNNSEFAWPGASSWALNGRNSLMNPGPAMASHKEGEDRFFPLSGSLIFGKQGTGRDNVDADKVMITNEEEIKTTNPVATESYGQVATNHQSAQAQAQTGWVQNQGILPGMVWQDRDVYLQGPIWAKIPHTDGNFHPSPLMGGFGMKHPPPQILIKNTPVPADPPTAFNKDKLNSFITQYSTGQVSVEIEWELQKENSKRWNPEIQYTSNYYKSNNVEFAVNTEGVYSEPRPIGTRYLTRNL

SEQ ID NO: 10 - protein, 742 aa, synthetic construct
MAADGYLPDWLEDNLSEGIREWWALKPGAPQPKANQQHQDNARGLVLPGYKYLGPGNGLDKGEPVNAADAAALEHDKAYDQQLKAGDNPYLKYNHADAEFQERLKEDTSFGGNLGRAVFQAKKRLLEPLGLVEEAAKTAPGKKRPVEQSPQEPDSSAGIGKSGAQPAKKRLNFGQTGDTESVPDPQPIGEPPAAPSGVGSLTMASGGGAPVADNNEGADGVGSSSGNWHCDSQWLGDRVITTSTRTWALPTYNNHLYKQISNSTSGGSSNDNAYFGYSTPWGYFDFNRFHCHFSPRDWQRLINNNWGFRPKRLNFKLFNIQVKEVTDNNGVKTIANNLTSTVQVFTDSDYQLPYVLGSAHEGCLPPFPADVFMIPQYGYLTLNDGSQAVGRSSFYCLEYFPSQMLRTGNNFQFSYEFENVPFHSSYAHSQSLDRLMNPLIDQYLYYLSKTVNGHDSPHKSGQRPSTLKFSVAGPSNMAVQGRNYIPGPSYRQQRVSTTVTQNNNSEFAWPGASSWALNGRNSLMNPGPAMASHKEGEDRFFPLSGSLIFGKQGTGRDNVDADKVMITNEEEIKTTNPVATESYGQVATNHQSAQAQAQTGWVQNQGILPGMVWQDRDVYLQGPIWAKIPHTDGNFHPSPLMGGFGMKHPPPQILIKNTPVPADPPTAFNKDKLNSFITQYSTGQVSVEIEWELQKENSKRWNPEIQYTSNYYKSNNVEFAVNTEGVYSEPRPIGTRYLTRNL

SEQ ID NO: 11 - protein, 736 aa, synthetic construct
MAADGYLPDWLEDNLSEGIREWWALKPGAPQPKANQQHQDNARGLVLPGYKYLGPGNGLDKGEPVNAADAAALEHDKAYDQQLKAGDNPYLKYNHADAEFQERLKEDTSFGGNLGRAVFQAKKRLLEPLGLVEEAAKTAPGKKRPVEQSPQEPDSSAGIGKSGAQPAKKRLNFGQTGDTESVPDPQPIGEPPAAPSGVGSLTMASGGGAPVADNNEGADGVGSSSGNWHCDSQWLGDRVITTSTRTWALPTYNNHLYKQISNSTSGGSSNDNAYFGYSTPWGYFDFNRFHCHFSPRDWQRLINNNWGFRPKRLNFKLFNIQVKEVTDNNGVKTIANNLTSTVQVFTDSDYQLPYVLGSAHEGCLPPFPADVFMIPQYGYLTLNDGSQAVGRSSFYCLEYFPSQMLRTGNNFQFSYEFENVPFHSSYAHSQSLDRLMNPLIDQYLYYLSRTINGSGQNQQTLKFSVAGPSNMAVQGRNYIPGPSYRQQRVSTTVTQNNNSEFAWPGASSWALNGRNSLMNPGPAMASHKEGEDRFFPLSGSLIFGKQGTGRDNVDADKVMITNEEEIKTTNPVATESYGQVATNHQSAQAQAQTGWVQNQGILPGMVWQDRDVYLQGPIWAKIPHTDGNFHPSPLMGGFGMKHPPPQILIKNTPVPADPPTAFNKDKLNSFITQYSTGQVSVEIEWELQKENSKRWNPEIQYTSNYYKSNNVEFAVNTEGVYSEPRPIGTRYLTRNL

SEQ ID NO: 12 - DNA, 2226 bp, synthetic construct
  source 1..2226: mol_type = other DNA
atggctgccgatggttatcttccagattggctcgaggacaaccttagtgaaggaattcgcgagtggtgggctttgaaacctggagcccctcaacccaaggcaaatcaacaacatcaagacaacgctcgaggtcttgtgcttccgggttacaaataccttggacccggcaacggactcgacaagggggagccggtcaacgcagcagacgcggcggccctcgagcacgacaaggcctacgaccagcagctcaaggccggagacaacccgtacctcaagtacaaccacgccgacgccgagttccaggagcggctcaaagaagatacgtcttttgggggcaacctcgggcgagcagtcttccaggccaaaaagaggcttcttgaacctcttggtctggttgaggaagcggctaagacggctcctggaaagaagaggcctgtagagcagtctcctcaggaaccggactcctccgcgggtattggcaaatcgggtgcacagcccgctaaaaagagactcaatttcggtcagactggcgacacagagtcagtcccagaccctcaaccaatcggagaacctcccgcagccccctcaggtgtgggatctcttacaatggcttcaggtggtggcgcaccagtggcagacaataacgaaggtgccgatggagtgggtagttcctcgggaaattggcattgcgattcccaatggctgggggacagagtcatcaccaccagcacccgaacctgggccctgcccacctacaacaatcacctctacaagcaaatctccaacagcacatctggaggatcttcaaatgacaacgcctacttcggctacagcaccccctgggggtattttgacttcaacagattccactgccacttctcaccacgtgactggcagcgactcatcaacaacaactggggattccggcctaagcgactcaacttcaagctcttcaacattcaggtcaaagaggttacggacaacaatggagtcaagaccatcgccaataaccttaccagcacggtccaggtcttcacggactcagactatcagctcccgtacgtgctcgggtcggctcacgagggctgcctcccgccgttcccagcggacgttttcatgattcctcagtacgggtatctgacgcttaatgatggaagccaggccgtgggtcgttcgtccttttactgcctggaatatttcccgtcgcaaatgctaagaacgggtaacaacttccagttcagctacgagtttgagaacgtacctttccatagcagctacgctcacagccaaagcctggaccgactaatgaatccactcatcgatcagtatctgtattacttgagtaagacggagcgtgtgtctggttctccgcattctaaggcgcagaatcagcagacgttgaagttttcggtagctggtcctagcaacatggctgtccagggaagaaactacatacctggacccagctaccgacaacaacgtgtctcaaccactgtgactcaaaacaacaacagcgaatttgcttggcctggagcttcttcttgggctctcaatggacgtaatagcttgatgaatcctggacctgctatggccagccacaaagaaggagaggaccgtttctttcctttgtctggatctttaatttttggcaaacaaggaactggaagagacaacgtggatgcggacaaagtcatgataaccaacgaagaagaaattaaaactactaacccggtagcaacggagtcctatggacaagtggccacaaaccaccagagtgcccaagcacaggcgcagaccggctgggttcaaaaccaaggaatacttccgggtatggtttggcaggacagagatgtgtacctgcaaggacccatttgggccaaaattcctcacacggacggcaactttcacccttctccgctgatgggagggtttggaatgaagcacccgcctcctcagatcctcatcaaaaacacacctgtacctgcggatcctccaacggccttcaacaaggacaagctgaactctttcatcacccagtattctactggccaagtcagcgtggagatcgagtgggagctgcagaaggaaaacagcaagcgctggaacccggagatccagtacacttccaactattacaagtctaataatgttgaatttgctgttaatactgaaggtgtatatagtgaaccccgccccattggcacgcggtatttaacgaggaactta

SEQ ID NO: 13 - DNA, 2226 bp, synthetic construct
  source 1..2226: mol_type = other DNA
atggctgccgatggttatcttccagattggctcgaggacaaccttagtgaaggaattcgcgagtggtgggctttgaaacctggagcccctcaacccaaggcaaatcaacaacatcaagacaacgctcgaggtcttgtgcttccgggttacaaataccttggacccggcaacggactcgacaagggggagccggtcaacgcagcagacgcggcggccctcgagcacgacaaggcctacgaccagcagctcaaggccggagacaacccgtacctcaagtacaaccacgccgacgccgagttccaggagcggctcaaagaagatacgtcttttgggggcaacctcgggcgagcagtcttccaggccaaaaagaggcttcttgaacctcttggtctggttgaggaagcggctaagacggctcctggaaagaagaggcctgtagagcagtctcctcaggaaccggactcctccgcgggtattggcaaatcgggtgcacagcccgctaaaaagagactcaatttcggtcagactggcgacacagagtcagtcccagaccctcaaccaatcggagaacctcccgcagccccctcaggtgtgggatctcttacaatggcttcaggtggtggcgcaccagtggcagacaataacgaaggtgccgatggagtgggtagttcctcgggaaattggcattgcgattcccaatggctgggggacagagtcatcaccaccagcacccgaacctgggccctgcccacctacaacaatcacctctacaagcaaatctccaacagcacatctggaggatcttcaaatgacaacgcctacttcggctacagcaccccctgggggtattttgacttcaacagattccactgccacttctcaccacgtgactggcagcgactcatcaacaacaactggggattccggcctaagcgactcaacttcaagctcttcaacattcaggtcaaagaggttacggacaacaatggagtcaagaccatcgccaataaccttaccagcacggtccaggtcttcacggactcagactatcagctcccgtacgtgctcgggtcggctcacgagggctgcctcccgccgttcccagcggacgttttcatgattcctcagtacgggtatctgacgcttaatgatggaagccaggccgtgggtcgttcgtccttttactgcctggaatatttcccgtcgcaaatgctaagaacgggtaacaacttccagttcagctacgagtttgagaacgtacctttccatagcagctacgctcacagccaaagcctggaccgactaatgaatccactcatcgatcagtatctgtattacttgagtaaggcggagattggtcatgattctccgcataagtctggtcagaatcagcagacgttgaagttttcggtagctggtcctagcaacatggctgtccagggaagaaactacatacctggacccagctaccgacaacaacgtgtctcaaccactgtgactcaaaacaacaacagcgaatttgcttggcctggagcttcttcttgggctctcaatggacgtaatagcttgatgaatcctggacctgctatggccagccacaaagaaggagaggaccgtttctttcctttgtctggatctttaatttttggcaaacaaggaactggaagagacaacgtggatgcggacaaagtcatgataaccaacgaagaagaaattaaaactactaacccggtagcaacggagtcctatggacaagtggccacaaaccaccagagtgcccaagcacaggcgcagaccggctgggttcaaaaccaaggaatacttccgggtatggtttggcaggacagagatgtgtacctgcaaggacccatttgggccaaaattcctcacacggacggcaactttcacccttctccgctgatgggagggtttggaatgaagcacccgcctcctcagatcctcatcaaaaacacacctgtacctgcggatcctccaacggccttcaacaaggacaagctgaactctttaatcacccagtattctactggccaagtcagcgtggagatcgagtgggagctgcagaaggaaaacagcaagcgctggaacccggagatccagtacacttccaactattacaagtctaataatgttgaatttgctgttaatactgaaggtgtatatagtgaaccccgccccattggcacgcggtatttaacgaggaactta

SEQ ID NO: 14 - DNA, 2226 bp, synthetic construct
  source 1..2226: mol_type = other DNA
atggctgccgatggttatcttccagattggctcgaggacaaccttagtgaaggaattcgcgagtggtgggctttgaaacctggagcccctcaacccaaggcaaatcaacaacatcaagacaacgctcgaggtcttgtgcttccgggttacaaataccttggacccggcaacggactcgacaagggggagccggtcaacgcagcagacgcggcggccctcgagcacgacaaggcctacgaccagcagctcaaggccggagacaacccgtacctcaagtacaaccacgccgacgccgagttccaggagcggctcaaagaagatacgtcttttgggggcaacctcgggcgagcagtcttccaggccaaaaagaggcttcttgaacctcttggtctggttgaggaagcggctaagacggctcctggaaagaagaggcctgtagagcagtctcctcaggaaccggactcctccgcgggtattggcaaatcgggtgcacagcccgctaaaaagagactcaatttcggtcagactggcgacacagagtcagtcccagaccctcaaccaatcggagaacctcccgcagccccctcaggtgtgggatctcttacaatggcttcaggtggtggcgcaccagtggcagacaataacgaaggtgccgatggagtgggtagttcctcgggaaattggcattgcgattcccaatggctgggggacagagtcatcaccaccagcacccgaacctgggccctgcccacctacaacaatcacctctacaagcaaatctccaacagcacatctggaggatcttcaaatgacaacgcctacttcggctacagcaccccctgggggtattttgacttcaacagattccactgccacttctcaccacgtgactggcagcgactcatcaacaacaactggggattccggcctaagcgactcaacttcaagctcttcaacattcaggtcaaagaggttacggacaacaatggagtcaagaccatcgccaataaccttaccagcacggtccaggtcttcacggactcagactatcagctcccgtacgtgctcgggtcggctcacgagggctgcctcccgccgttcccagcggacgttttcatgattcctcagtacgggtatctgacgcttaatgatggaagccaggccgtgggtcgttcgtccttttactgcctggaatatttcccgtcgcaaatgctaagaacgggtaacaacttccagttcagctacgagtttgagaacgtacctttccatagcagctacgctcacagccaaagcctggaccgactaatgaatccactcatcgatcagtatctgtattacttgagtaagacgattattggttctggttctccgcattctaaggcgcagaatcgtcatacgttgaagttttcggtagctggtcctagcaacatggctgtccagggaagaaactacatacctggacccagctaccgacaacaacgtgtctcaaccactgtgactcaaaacaacaacagcgaatttgcttggcctggagcttcttcttgggctctcaatggacgtaatagcttgatgaatcctggacctgctatggccagccacaaagaaggagaggaccgtttctttcctttgtctggatctttaatttttggcaaacaaggaactggaagagacaacgtggatgcggacaaagtcatgataaccaacgaagaagaaattaaaactactaacccggtagcaacggagtcctatggacaagtggccacaaaccaccagagtgcccaagcacaggcgcagaccggctgggttcaaaaccaaggaatacttccgggtatggtttggcaggacagagatgtgtacctgcaaggacccatttgggccaaaattcctcacacggacggcaactttcacccttctccgctgatgggagggtttggaatgaagcacccgcctcctcagatcctcatcaaaaacacacctgtacctgcggatcctccaacggccttcaacaaggacaagctgaactctttcatcacccagtattctactggccaagtcagcgtggagatcgagtgggagctgcagaaggaaaacagcaagcgctggaacccggagatccagtacacttccaactattacaagtctaataatgttgaatttgctgttaatactgaaggtgtatatagtgaaccccgccccattggcacgcggtatttaacgaggaactta

SEQ ID NO: 15 - DNA, 2226 bp, synthetic construct
  source 1..2226: mol_type = other DNA
atggctgccgatggttatcttccagattggctcgaggacaaccttagtgaaggaattcgcgagtggtgggctttgaaacctggagcccctcaacccaaggcaaatcaacaacatcaagacaacgctcgaggtcttgtgcttccgggttacaaataccttggacccggcaacggactcgacaagggggagccggtcaacgcagcagacgcggcggccctcgagcacgacaaggcctacgaccagcagctcaaggccggagacaacccgtacctcaagtacaaccacgccgacgccgagttccaggagcggctcaaagaagatacgtcttttgggggcaacctcgggcgagcagtcttccaggccaaaaagaggcttcttgaacctcttggtctggttgaggaagcggctaagacggctcctggaaagaagaggcctgtagagcagtctcctcaggaaccggactcctccgcgggtattggcaaatcgggtgcacagcccgctaaaaagagactcaatttcggtcagactggcgacacagagtcagtcccagaccctcaaccaatcggagaacctcccgcagccccctcaggtgtgggatctcttacaatggcttcaggtggtggcgcaccagtggcagacaataacgaaggtgccgatggagtgggtagttcctcgggaaattggcattgcgattcccaatggctgggggacagagtcatcaccaccagcacccgaacctgggccctgcccacctacaacaatcacctctacaagcaaatctccaacagcacatctggaggatcttcaaatgacaacgcctacttcggctacagcaccccctgggggtattttgacttcaacagattccactgccacttctcaccacgtgactggcagcgactcatcaacaacaactggggattccggcctaagcgactcaacttcaagctcttcaacattcaggtcaaagaggttacggacaacaatggagtcaagaccatcgccaataaccttaccagcacggtccaggtcttcacggactcagactatcagctcccgtacgtgctcgggtcggctcacgagggctgcctcccgccgttcccagcggacgttttcatgattcctcagtacgggtatctgacgcttaatgatggaagccaggccgtgggtcgttcgtccttttactgcctggaatatttcccgtcgcaaatgctaagaacgggtaacaacttccagttcagctacgagtttgagaacgtacctttccatagcagctacgctcacagccaaagcctggaccgactaatgaatccactcatcgatcagtatctgtattacttgagtaagacggagaagatgtctggttctccgcattctaaggcgcagaatcagcagacgttgaagttttcggtagctggtcctagcaacatggctgtccagggaagaaactacatacctggacccagctaccgacaacaacgtgtctcaaccactgtgactcaaaacaacaacagcgaatttgcttggcctggagcttcttcttgggctctcaatggacgtaatagcttgatgaatcctggacctgctatggccagccacaaagaaggagaggaccgtttctttcctttgtctggatctttaatttttggcaaacaaggaactggaagagacaacgtggatgcggacaaagtcatgataaccaacgaagaagaaattaaaactactaacccggtagcaacggagtcctatggacaagtggccacaaaccaccagagtgcccaagcacaggcgcagaccggctgggttcaaaaccaaggaatacttccgggtatggtttggcaggacagagatgtgtacctgcaaggacccatttgggccaaaattcctcacacggacggcaactttcacccttctccgctgatgggagggtttggaatgaagcacccgcctcctcagatcctcatcaaaaacacacctgtacctgcggatcctccaacggccttcaacaaggacaagctgaactctttcatcacccagtattctactggccaagtcagcgtggagatcgagtgggagctgcagaaggaaaacagcaagcgctggaacccggagatccagtacacttccaactattacaagtctaataatgttgaatttgctgttaatactgaaggtgtatatagtgaaccccgccccattggcacgcggtatttaacgaggaactta

SEQ ID NO: 16 - DNA, 2226 bp, synthetic construct
  source 1..2226: mol_type = other DNA
atggctgccgatggttatcttccagattggctcgaggacaaccttagtgaaggaattcgcgagtggtgggctttgaaacctggagcccctcaacccaaggcaaatcaacaacatcaagacaacgctcgaggtcttgtgcttccgggttacaaataccttggacccggcaacggactcgacaagggggagccggtcaacgcagcagacgcggcggccctcgagcacgacaaggcctacgaccagcagctcaaggccggagacaacccgtacctcaagtacaaccacgccgacgccgagttccaggagcggctcaaagaagatacgtcttttgggggcaacctcgggcgagcagtcttccaggccaaaaagaggcttcttgaacctcttggtctggttgaggaagcggctaagacggctcctggaaagaagaggcctgtagagcagtctcctcaggaaccggactcctccgcgggtattggcaaatcgggtgcacagcccgctaaaaagagactcaatttcggtcagactggcgacacagagtcagtcccagaccctcaaccaatcggagaacctcccgcagccccctcaggtgtgggatctcttacaatggcttcaggtggtggcgcaccagtggcagacaataacgaaggtgccgatggagtgggtagttcctcgggaaattggcattgcgattcccaatggctgggggacagagtcatcaccaccagcacccgaacctgggccctgcccacctacaacaatcacctctacaagcaaatctccaacagcacatctggaggatcttcaaatgacaacgcctacttcggctacagcaccccctgggggtattttgacttcaacagattccactgccacttctcaccacgtgactggcagcgactcatcaacaacaactggggattccggcctaagcgactcaacttcaagctcttcaacattcaggtcaaagaggttacggacaacaatggagtcaagaccatcgccaataaccttaccagcacggtccaggtcttcacggactcagactatcagctcccgtacgtgctcgggtcggctcacgagggctgcctcccgccgttcccagcggacgttttcatgattcctcagtacgggtatctgacgcttaatgatggaagccaggccgtgggtcgttcgtccttttactgcctggaatatttcccgtcgcaaatgctaagaacgggtaacaacttccagttcagctacgagtttgagaacgtacctttccatagcagctacgctcacagccaaagcctggaccgactaatgaatccactcatcgatcagtatctgtattacttgagtaaggagattaatggtcgtggttctccgcattctaaggcgcagaatcagcagacgttgaagttttcggtagctggtcctagcaacatggctgtccagggaagaaactacatacctggacccagctaccgacaacaacgtgtctcaaccactgtgactcaaaacaacaacagcgaatttgcttggcctggagcttcttcttgggctctcaatggacgtaatagcttgatgaatcctggacctgctatggccagccacaaagaaggagaggaccgtttctttcctttgtctggatctttaatttttggcaaacaaggaactggaagagacaacgtggatgcggacaaagtcatgataaccaacgaagaagaaattaaaactactaacccggtagcaacggagtcctatggacaagtggccacaaaccaccagagtgcccaagcacaggcgcagaccggctgggttcaaaaccaaggaatacttccgggtatggtttggcaggacagagatgtgtacctgcaaggacccatttgggccaaaattcctcacacggacggcaactttcacccttctccgctgatgggagggtttggaatgaagcacccgcctcctcagatcctcatcaaaaacacacctgtacctgcggatcctccaacggccttcaacaaggacaagctgaactctttcatcacccagtattctactggccaagtcagcgtggagatcgagtgggagctgcagaaggaaaacagcaagcgctggaacccggagatccagtacacttccaactattacaagtctaataatgttgaatttgctgttaatactgaaggtgtatatagtgaaccccgccccattggcacgcggtatttaacgaggaactta

SEQ ID NO: 17 - DNA, 2226 bp, synthetic construct
  source 1..2226: mol_type = other DNA
atggctgccgatggttatcttccagattggctcgaggacaaccttagtgaaggaattcgcgagtggtgggctttgaaacctggagcccctcaacccaaggcaaatcaacaacatcaagacaacgctcgaggtcttgtgcttccgggttacaaataccttggacccggcaacggactcgacaagggggagccggtcaacgcagcagacgcggcggccctcgagcacgacaaggcctacgaccagcagctcaaggccggagacaacccgtacctcaagtacaaccacgccgacgccgagttccaggagcggctcaaagaagatacgtcttttgggggcaacctcgggcgagcagtcttccaggccaaaaagaggcttcttgaacctcttggtctggttgaggaagcggctaagacggctcctggaaagaagaggcctgtagagcagtctcctcaggaaccggactcctccgcgggtattggcaaatcgggtgcacagcccgctaaaaagagactcaatttcggtcagactggcgacacagagtcagtcccagaccctcaaccaatcggagaacctcccgcagccccctcaggtgtgggatctcttacaatggcttcaggtggtggcgcaccagtggcagacaataacgaaggtgccgatggagtgggtagttcctcgggaaattggcattgcgattcccaatggctgggggacagagtcatcaccaccagcacccgaacctgggccctgcccacctacaacaatcacctctacaagcaaatctccaacagcacatctggaggatcttcaaatgacaacgcctacttcggctacagcaccccctgggggtattttgacttcaacagattccactgccacttctcaccacgtgactggcagcgactcatcaacaacaactggggattccggcctaagcgactcaacttcaagctcttcaacattcaggtcaaagaggttacggacaacaatggagtcaagaccatcgccaataaccttaccagcacggtccaggtcttcacggactcagactatcagctcccgtacgtgctcgggtcggctcacgagggctgcctcccgccgttcccagcggacgttttcatgattcctcagtacgggtatctgacgcttaatgatggaagccaggccgtgggtcgttcgtccttttactgcctggaatatttcccgtcgcaaatgctaagaacgggtaacaacttccagttcagctacgagtttgagaacgtacctttccatagcagctacgctcacagccaaagcctggaccgactaatgaatccactcatcgatcagtatctgtattacttgagtaagacgtttaatggttctggttctccgcattctaaggcgccgaatctgcagacgttgaagttttcggtagctggtcctagcaacatggctgtccagggaagaaactacatacctggacccagctaccgacaacaacgtgtctcaaccactgtgactcaaaacaacaacagcgaatttgcttggcctggagcttcttcttgggctctcaatggacgtaatagcttgatgaatcctggacctgctatggccagccacaaagaaggagaggaccgtttctttcctttgtctggatctttaatttttggcaaacaaggaactggaagagacaacgtggatgcggacaaagtcatgataaccaacgaagaagaaattaaaactactaacccggtagcaacggagtcctatggacaagtggccacaaaccaccagagtgcccaagcacaggcgcagaccggctgggttcaaaaccaaggaatacttccgggtatggtttggcaggacagagatgtgtacctgcaaggacccatttgggccaaaattcctcacacggacggcaactttcacccttctccgctgatgggagggtttggaatgaagcacccgcctcctcagatcctcatcaaaaacacacctgtacctgcggatcctccaacggccttcaacaaggacaagctgaactctttcatcacccagtattctactggccaagtcagcgtggagatcgagtgggagctgcagaaggaaaacagcaagcgctggaacccggagatccagtacacttccaactattacaagtctaataatgttgaatttgctgttaatactgaaggtgtatatagtgaaccccgccccattggcacgcggtatttaacgaggaactta

SEQ ID NO: 18 - DNA, 2226 bp, synthetic construct
  source 1..2226: mol_type = other DNA
atggctgccgatggttatcttccagattggctcgaggacaaccttagtgaaggaattcgcgagtggtgggctttgaaacctggagcccctcaacccaaggcaaatcaacaacatcaagacaacgctcgaggtcttgtgcttccgggttacaaataccttggacccggcaacggactcgacaagggggagccggtcaacgcagcagacgcggcggccctcgagcacgacaaggcctacgaccagcagctcaaggccggagacaacccgtacctcaagtacaaccacgccgacgccgagttccaggagcggctcaaagaagatacgtcttttgggggcaacctcgggcgagcagtcttccaggccaaaaagaggcttcttgaacctcttggtctggttgaggaagcggctaagacggctcctggaaagaagaggcctgtagagcagtctcctcaggaaccggactcctccgcgggtattggcaaatcgggtgcacagcccgctaaaaagagactcaatttcggtcagactggcgacacagagtcagtcccagaccctcaaccaatcggagaacctcccgcagccccctcaggtgtgggatctcttacaatggcttcaggtggtggcgcaccagtggcagacaataacgaaggtgccgatggagtgggtagttcctcgggaaattggcattgcgattcccaatggctgggggacagagtcatcaccaccagcacccgaacctgggccctgcccacctacaacaatcacctctacaagcaaatctccaacagcacatctggaggatcttcaaatgacaacgcctacttcggctacagcaccccctgggggtattttgacttcaacagattccactgccacttctcaccacgtgactggcagcgactcatcaacaacaactggggattccggcctaagcgactcaacttcaagctcttcaacattcaggtcaaagaggttacggacaacaatggagtcaagaccatcgccaataaccttaccagcacggtccaggtcttcacggactcagactatcagctcccgtacgtgctcgggtcggctcacgagggctgcctcccgccgttcccagcggacgttttcatgattcctcagtacgggtatctgacgcttaatgatggaagccaggccgtgggtcgttcgtccttttactgcctggaatatttcccgtcgcaaatgctaagaacgggtaacaacttccagttcagctacgagtttgagaacgtacctttccatagcagctacgctcacagccaaagcctggaccgactaatgaatccactcatcgatcagtatctgtattacttgagtaagacggagaagacgtctggttctccgcattctaaggcgcagaatcagcagacgttgaagttttcggtagctggtcctagcaacatggctgtccagggaagaaactacatacctggacccagctaccgacaacaacgtgtctcaaccactgtgactcaaaacaacaacagcgaatttgcttggcctggagcttcttcttgggctctcaatggacgtaatagcttgatgaatcctggacctgctatggccagccacaaagaaggagaggaccgtttctttcctttgtctggatctttaatttttggcaaacaaggaactggaagagacaacgtggatgcggacaaagtcatgataaccaacgaagaagaaattaaaactactaacccggtagcaacggagtcctatggacaagtggccacaaaccaccagagtgcccaagcacaggcgcagaccggctgggttcaaaaccaaggaatacttccgggtatggtttggcaggacagagatgtgtacctgcaaggacccatttgggccaaaattcctcacacggacggcaactttcacccttctccgctgatgggagggtttggaatgaagcacccgcctcctcagatcctcatcaaaaacacacctgtacctgcggatcctccaacggccttcaacaaggacaagctgaactctttcatcacccagtattctactggccaagtcagcgtggagatcgagtgggagctgcagaaggaaaacagcaagcgctggaacccggagatccagtacacttccaactattacaagtctaataatgttgaatttgctgttaatactgaaggtgtatatagtgaaccccgccccattggcacgcggtatttaacgaggaactta

SEQ ID NO: 19 - DNA, 2226 bp, synthetic construct
  source 1..2226: mol_type = other DNA
atggctgccgatggttatcttccagattggctcgaggacaaccttagtgaaggaattcgcgagtggtgggctttgaaacctggagcccctcaacccaaggcaaatcaacaacatcaagacaacgctcgaggtcttgtgcttccgggttacaaataccttggacccggcaacggactcgacaagggggagccggtcaacgcagcagacgcggcggccctcgagcacgacaaggcctacgaccagcagctcaaggccggagacaacccgtacctcaagtacaaccacgccgacgccgagttccaggagcggctcaaagaagatacgtcttttgggggcaacctcgggcgagcagtcttccaggccaaaaagaggcttcttgaacctcttggtctggttgaggaagcggctaagacggctcctggaaagaagaggcctgtagagcagtctcctcaggaaccggactcctccgcgggtattggcaaatcgggtgcacagcccgctaaaaagagactcaatttcggtcagactggcgacacagagtcagtcccagaccctcaaccaatcggagaacctcccgcagccccctcaggtgtgggatctcttacaatggcttcaggtggtggcgcaccagtggcagacaataacgaaggtgccgatggagtgggtagttcctcgggaaattggcattgcgattcccaatggctgggggacagagtcatcaccaccagcacccgaacctgggccctgcccacctacaacaatcacctctacaagcaaatctccaacagcacatctggaggatcttcaaatgacaacgcctacttcggctacagcaccccctgggggtattttgacttcaacagattccactgccacttctcaccacgtgactggcagcgactcatcaacaacaactggggattccggcctaagcgactcaacttcaagctcttcaacattcaggtcaaagaggttacggacaacaatggagtcaagaccatcgccaataaccttaccagcacggtccaggtcttcacggactcagactatcagctcccgtacgtgctcgggtcggctcacgagggctgcctcccgccgttcccagcggacgttttcatgattcctcagtacgggtatctgacgcttaatgatggaagccaggccgtgggtcgttcgtccttttactgcctggaatatttcccgtcgcaaatgctaagaacgggtaacaacttccagttcagctacgagtttgagaacgtacctttccatagcagctacgctcacagccaaagcctggaccgactaatgaatccactcatcgatcagtatctgtattacttgagtaagacgatgaatggtcatgattctccgcattctaaggcgcagaatcagcagacgttgaagttttcggtagctggtcctagcaacatggctgtccagggaagaaactacatacctggacccagctaccgacaacaacgtgtctcaaccactgtgactcaaaacaacaacagcgaatttgcttggcctggagcttcttcttgggctctcaatggacgtaatagcttgatgaatcctggacctgctatggccagccacaaagaaggagaggaccgtttctttcctttgtctggatctttaatttttggcaaacaaggaactggaagagacaacgtggatgcggacaaagtcatgataaccaacgaagaagaaattaaaactactaacccggtagcaacggagtcctatggacaagtggccacaaaccaccagagtgcccaagcacaggcgcagaccggctgggttcaaaaccaaggaatacttccgggtatggtttggcaggacagagatgtgtacctgcaaggacccatttgggccaaaattcctcacacggacggcaactttcacccttctccgctgatgggagggtttggaatgaagcacccgcctcctcagatcctcatcaaaaacacacctgtacctgcggatcctccaacggccttcaacaaggacaagctgaactctttcatcacccagtattctactggccaagtcagcgtggagatcgagtgggagctgcagaaggaaaacagcaagcgctggaacccggagatccagtacacttccaactattacaagtctaataatgttgaatttgctgttaatactgaaggtgtatatagtgaaccccgccccattggcacgcggtatttaacgaggaactta

SEQ ID NO: 20 - DNA, 2226 bp, synthetic construct
  source 1..2226: mol_type = other DNA
atggctgccgatggttatcttccagattggctcgaggacaaccttagtgaaggaattcgcgagtggtgggctttgaaacctggagcccctcaacccaaggcaaatcaacaacatcaagacaacgctcgaggtcttgtgcttccgggttacaaataccttggacccggcaacggactcgacaagggggagccggtcaacgcagcagacgcggcggccctcgagcacgacaaggcctacgaccagcagctcaaggccggagacaacccgtacctcaagtacaaccacgccgacgccgagttccaggagcggctcaaagaagatacgtcttttgggggcaacctcgggcgagcagtcttccaggccaaaaagaggcttcttgaacctcttggtctggttgaggaagcggctaagacggctcctggaaagaagaggcctgtagagcagtctcctcaggaaccggactcctccgcgggtattggcaaatcgggtgcacagcccgctaaaaagagactcaatttcggtcagactggcgacacagagtcagtcccagaccctcaaccaatcggagaacctcccgcagccccctcaggtgtgggatctcttacaatggcttcaggtggtggcgcaccagtggcagacaataacgaaggtgccgatggagtgggtagttcctcgggaaattggcattgcgattcccaatggctgggggacagagtcatcaccaccagcacccgaacctgggccctgcccacctacaacaatcacctctacaagcaaatctccaacagcacatctggaggatcttcaaatgacaacgcctacttcggctacagcaccccctgggggtattttgacttcaacagattccactgccacttctcaccacgtgactggcagcgactcatcaacaacaactggggattccggcctaagcgactcaacttcaagctcttcaacattcaggtcaaagaggttacggacaacaatggagtcaagaccatcgccaataaccttaccagcacggtccaggtcttcacggactcagactatcagctcccgtacgtgctcgggtcggctcacgagggctgcctcccgccgttcccagcggacgttttcatgattcctcagtacgggtatctgacgcttaatgatggaagccaggccgtgggtcgttcgtccttttactgcctggaatatttcccgtcgcaaatgctaagaacgggtaacaacttccagttcagctacgagtttgagaacgtacctttccatagcagctacgctcacagccaaagcctggaccgactaatgaatccactcatcgatcagtatctgtattacttgagtaagacgattgatggtcatgattctccgcattctaaggcgcagaatcagcagacgttgaagttttcggtagctggtcctagcaacatggctgtccagggaagaaactacatacctggacccagctaccgacaacaacgtgtctcaaccactgtgactcaaaacaacaacagcgaatttgcttggcctggagcttcttcttgggctctcaatggacgtaatagcttgatgaatcctggacctgctatggccagccacaaagaaggagaggaccgtttctttcctttgtctggatctttaatttttggcaaacaaggaactggaagagacaacgtggatgcggacaaagtcatgataaccaacgaagaagaaattaaaactactaacccggtagcaacggagtcctatggacaagtggccacaaaccaccagagtgcccaagcacaggcgcagaccggctgggttcaaaaccaaggaatacttccgggtatggtttggcaggacagagatgtgtacctgcaaggacccatttgggccaaaattcctcacacggacggcaactttcacccttctccgctgatgggagggtttggaatgaagcacccgcctcctcagatcctcatcaaaaacacacctgtacctgcggatcctccaacggccttcaacaaggacaagctgaactctttcatcacccagtattctactggccaagtcagcgtggagatcgagtgggagctgcagaaggaaaacagcaagcgctggaacccggagatccagtacacttccaactattacaagtctaataatgttgaatttgctgttaatactgaaggtgtatatagtgaaccccgccccattggcacgcggtatttaacgaggaactta

SEQ ID NO: 21 - DNA, 2226 bp, synthetic construct
  source 1..2226: mol_type = other DNA
atggctgccgatggttatcttccagattggctcgaggacaaccttagtgaaggaattcgcgagtggtgggctttgaaacctggagcccctcaacccaaggcaaatcaacaacatcaagacaacgctcgaggtcttgtgcttccgggttacaaataccttggacccggcaacggactcgacaagggggagccggtcaacgcagcagacgcggcggccctcgagcacgacaaggcctacgaccagcagctcaaggccggagacaacccgtacctcaagtacaaccacgccgacgccgagttccaggagcggctcaaagaagatacgtcttttgggggcaacctcgggcgagcagtcttccaggccaaaaagaggcttcttgaacctcttggtctggttgaggaagcggctaagacggctcctggaaagaagaggcctgtagagcagtctcctcaggaaccggactcctccgcgggtattggcaaatcgggtgcacagcccgctaaaaagagactcaatttcggtcagactggcgacacagagtcagtcccagaccctcaaccaatcggagaacctcccgcagccccctcaggtgtgggatctcttacaatggcttcaggtggtggcgcaccagtggcagacaataacgaaggtgccgatggagtgggtagttcctcgggaaattggcattgcgattcccaatggctgggggacagagtcatcaccaccagcacccgaacctgggccctgcccacctacaacaatcacctctacaagcaaatctccaacagcacatctggaggatcttcaaatgacaacgcctacttcggctacagcaccccctgggggtattttgacttcaacagattccactgccacttctcaccacgtgactggcagcgactcatcaacaacaactggggattccggcctaagcgactcaacttcaagctcttcaacattcaggtcaaagaggttacggacaacaatggagtcaagaccatcgccaataaccttaccagcacggtccaggtcttcacggactcagactatcagctcccgtacgtgctcgggtcggctcacgagggctgcctcccgccgttcccagcggacgttttcatgattcctcagtacgggtatctgacgcttaatgatggaagccaggccgtgggtcgttcgtccttttactgcctggaatatttcccgtcgcaaatgctaagaacgggtaacaacttccagttcagctacgagtttgagaacgtacctttccatagcagctacgctcacagccaaagcctggaccgactaatgaatccactcatcgatcagtatctgtattacttgagtaagacgaataatggtcatgattctccgcattctaaggcgcagaatcagcagacgttgaagttttcggtagctggtcctagcaacatggctgtccagggaagaaactacatacctggacccagctaccgacaacaacgtgtctcaaccactgtgactcaaaacaacaacagcgaatttgcttggcctggagcttcttcttgggctctcaatggacgtaatagcttgatgaatcctggacctgctatggccagccacaaagaaggagaggaccgtttctttcctttgtctggatctttaatttttggcaaacaaggaactggaagagacaacgtggatgcggacaaagtcatgataaccaacgaagaagaaattaaaactactaacccggtagcaacggagtcctatggacaagtggccacaaaccaccagagtgcccaagcacaggcgcagaccggctgggttcaaaaccaaggaatacttccgggtatggtttggcaggacagagatgtgtacctgcaaggacccatttgggccaaaattcctcacacggacggcaactttcacccttctccgctgatgggagggtttggaatgaagcacccgcctcctcagatcctcatcaaaaacacacctgtacctgcggatcctccaacggccttcaacaaggacaagctgaactctttcatcacccagtattctactggccaagtcagcgtggagatcgagtgggagctgcagaaggaaaacagcaagcgctggaacccggagatccagtacacttccaactattacaagtctaataatgttgaatttgctgttaatactgaaggtgtatatagtgaaccccgccccattggcacgcggtatttaacgaggaactta

SEQ ID NO: 22 - DNA, 2226 bp, synthetic construct
  source 1..2226: mol_type = other DNA
atggctgccgatggttatcttccagattggctcgaggacaaccttagtgaaggaattcgcgagtggtgggctttgaaacctggagcccctcaacccaaggcaaatcaacaacatcaagacaacgctcgaggtcttgtgcttccgggttacaaataccttggacccggcaacggactcgacaagggggagccggtcaacgcagcagacgcggcggccctcgagcacgacaaggcctacgaccagcagctcaaggccggagacaacccgtacctcaagtacaaccacgccgacgccgagttccaggagcggctcaaagaagatacgtcttttgggggcaacctcgggcgagcagtcttccaggccaaaaagaggcttcttgaacctcttggtctggttgaggaagcggctaagacggctcctggaaagaagaggcctgtagagcagtctcctcaggaaccggactcctccgcgggtattggcaaatcgggtgcacagcccgctaaaaagagactcaatttcggtcagactggcgacacagagtcagtcccagaccctcaaccaatcggagaacctcccgcagccccctcaggtgtgggatctcttacaatggcttcaggtggtggcgcaccagtggcagacaataacgaaggtgccgatggagtgggtagttcctcgggaaattggcattgcgattcccaatggctgggggacagagtcatcaccaccagcacccgaacctgggccctgcccacctacaacaatcacctctacaagcaaatctccaacagcacatctggaggatcttcaaatgacaacgcctacttcggctacagcaccccctgggggtattttgacttcaacagattccactgccacttctcaccacgtgactggcagcgactcatcaacaacaactggggattccggcctaagcgactcaacttcaagctcttcaacattcaggtcaaagaggttacggacaacaatggagtcaagaccatcgccaataaccttaccagcacggtccaggtcttcacggactcagactatcagctcccgtacgtgctcgggtcggctcacgagggctgcctcccgccgttcccagcggacgttttcatgattcctcagtacgggtatctgacgcttaatgatggaagccaggccgtgggtcgttcgtccttttactgcctggaatatttcccgtcgcaaatgctaagaacgggtaacaacttccagttcagctacgagtttgagaacgtacctttccatagcagctacgctcacagccaaagcctggaccgactaatgaatccactcatcgatcagtatctgtattacttgagtaagacgcagcgtaagtctggttctccgcattctaaggcgcagaatcagcagacgttgaagttttcggtagctggtcctagcaacatggctgtccagggaagaaactacatacctggacccagctaccgacaacaacgtgtctcaaccactgtgactcaaaacaacaacagcgaatttgcttggcctggagcttcttcttgggctctcaatggacgtaatagcttgatgaatcctggacctgctatggccagccacaaagaaggagaggaccgtttctttcctttgtctggatctttaatttttggcaaacaaggaactggaagagacaacgtggatgcggacaaagtcatgataaccaacgaagaagaaattaaaactactaacccggtagcaacggagtcctatggacaagtggccacaaaccaccagagtgcccaagcacaggcgcagaccggctgggttcaaaaccaaggaatacttccgggtatggtttggcaggacagagatgtgtacctgcaaggacccatttgggccaaaattcctcacacggacggcaactttcacccttctccgctgatgggagggtttggaatgaagcacccgcctcctcagatcctcatcaaaaacacacctgtacctgcggatcctccaacggccttcaacaaggacaagctgaactctttcatcacccagtattctactggccaagtcagcgtggagatcgagtgggagctgcagaaggaaaacagcaagcgctggaacccggagatccagtacacttccaactattacaagtctaataatgttgaatttgctgttaatactgaaggtgtatatagtgaaccccgccccattggcacgcggtatttaacgaggaactta

SEQ ID NO: 23 - DNA, 2226 bp, synthetic construct
  source 1..2226: mol_type = other DNA
atggctgccgatggttatcttccagattggctcgaggacaaccttagtgaaggaattcgcgagtggtgggctttgaaacctggagcccctcaacccaaggcaaatcaacaacatcaagacaacgctcgaggtcttgtgcttccgggttacaaataccttggacccggcaacggactcgacaagggggagccggtcaacgcagcagacgcggcggccctcgagcacgacaaggcctacgaccagcagctcaaggccggagacaacccgtacctcaagtacaaccacgccgacgccgagttccaggagcggctcaaagaagatacgtcttttgggggcaacctcgggcgagcagtcttccaggccaaaaagaggcttcttgaacctcttggtctggttgaggaagcggctaagacggctcctggaaagaagaggcctgtagagcagtctcctcaggaaccggactcctccgcgggtattggcaaatcgggtgcacagcccgctaaaaagagactcaatttcggtcagactggcgacacagagtcagtcccagaccctcaaccaatcggagaacctcccgcagccccctcaggtgtgggatctcttacaatggcttcaggtggtggcgcaccagtggcagacaataacgaaggtgccgatggagtgggtagttcctcgggaaattggcattgcgattcccaatggctgggggacagagtcatcaccaccagcacccgaacctgggccctgcccacctacaacaatcacctctacaagcaaatctccaacagcacatctggaggatcttcaaatgacaacgcctacttcggctacagcaccccctgggggtattttgacttcaacagattccactgccacttctcaccacgtgactggcagcgactcatcaacaacaactggggattccggcctaagcgactcaacttcaagctcttcaacattcaggtcaaagaggttacggacaacaatggagtcaagaccatcgccaataaccttaccagcacggtccaggtcttcacggactcagactatcagctcccgtacgtgctcgggtcggctcacgagggctgcctcccgccgttcccagcggacgttttcatgattcctcagtacgggtatctgacgcttaatgatggaagccaggccgtgggtcgttcgtccttttactgcctggaatatttcccgtcgcaaatgctaagaacgggtaacaacttccagttcagctacgagtttgagaacgtacctttccatagcagctacgctcacagccaaagcctggaccgactaatgaatccactcatcgatcagtatctgtattacttgagtaagacgattaatggttctggttctccgcattctaaggcgcaggcgcgtaagacgttgaagttttcggtagctggtcctagcaacatggctgtccagggaagaaactacatacctggacccagctaccgacaacaacgtgtctcaaccactgtgactcaaaacaacaacagcgaatttgcttggcctggagcttcttcttgggctctcaatggacgtaatagcttgatgaatcctggacctgctatggccagccacaaagaaggagaggaccgtttctttcctttgtctggatctttaatttttggcaaacaaggaactggaagagacaacgtggatgcggacaaagtcatgataaccaacgaagaagaaattaaaactactaacccggtagcaacggagtcctatggacaagtggccacaaaccaccagagtgcccaagcacaggcgcagaccggctgggttcaaaaccaaggaatacttccgggtatggtttggcaggacagagatgtgtacctgcaaggacccatttgggccaaaattcctcacacggacggcaactttcacccttctccgctgatgggagggtttggaatgaagcacccgcctcctcagatcctcatcaaaaacacacctgtacctgcggatcctccaacggccttcaacaaggacaagctgaactctttcatcacccagtattctactggccaagtcagcgtggagatcgagtgggagctgcagaaggaaaacagcaagcgctggaacccggagatccagtacacttccaactattacaagtctaataatgttgaatttgctgttaatactgaaggtgtatatagtgaaccccgccccattggcacgcggtatttaacgaggaactta

SEQ ID NO: 24 - DNA, 2226 bp, synthetic construct
  source 1..2226: mol_type = other DNA
atggctgccgatggttatcttccagattggctcgaggacaaccttagtgaaggaattcgcgagtggtgggctttgaaacctggagcccctcaacccaaggcaaatcaacaacatcaagacaacgctcgaggtcttgtgcttccgggttacaaataccttggacccggcaacggactcgacaagggggagccggtcaacgcagcagacgcggcggccctcgagcacgacaaggcctacgaccagcagctcaaggccggagacaacccgtacctcaagtacaaccacgccgacgccgagttccaggagcggctcaaagaagatacgtcttttgggggcaacctcgggcgagcagtcttccaggccaaaaagaggcttcttgaacctcttggtctggttgaggaagcggctaagacggctcctggaaagaagaggcctgtagagcagtctcctcaggaaccggactcctccgcgggtattggcaaatcgggtgcacagcccgctaaaaagagactcaatttcggtcagactggcgacacagagtcagtcccagaccctcaaccaatcggagaacctcccgcagccccctcaggtgtgggatctcttacaatggcttcaggtggtggcgcaccagtggcagacaataacgaaggtgccgatggagtgggtagttcctcgggaaattggcattgcgattcccaatggctgggggacagagtcatcaccaccagcacccgaacctgggccctgcccacctacaacaatcacctctacaagcaaatctccaacagcacatctggaggatcttcaaatgacaacgcctacttcggctacagcaccccctgggggtattttgacttcaacagattccactgccacttctcaccacgtgactggcagcgactcatcaacaacaactggggattccggcctaagcgactcaacttcaagctcttcaacattcaggtcaaagaggttacggacaacaatggagtcaagaccatcgccaataaccttaccagcacggtccaggtcttcacggactcagactatcagctcccgtacgtgctcgggtcggctcacgagggctgcctcccgccgttcccagcggacgttttcatgattcctcagtacgggtatctgacgcttaatgatggaagccaggccgtgggtcgttcgtccttttactgcctggaatatttcccgtcgcaaatgctaagaacgggtaacaacttccagttcagctacgagtttgagaacgtacctttccatagcagctacgctcacagccaaagcctggaccgactaatgaatccactcatcgatcagtatctgtattacttgagtaagtatattgtgggttctggttctccgcattctaaggcgcagaatcagcagacgttgaagttttcggtagctggtcctagcaacatggctgtccagggaagaaactacatacctggacccagctaccgacaacaacgtgtctcaaccactgtgactcaaaacaacaacagcgaatttgcttggcctggagcttcttcttgggctctcaatggacgtaatagcttgatgaatcctggacctgctatggccagccacaaagaaggagaggaccgtttctttcctttgtctggatctttaatttttggcaaacaaggaactggaagagacaacgtggatgcggacaaagtcatgataaccaacgaagaagaaattaaaactactaacccggtagcaacggagtcctatggacaagtggccacaaaccaccagagtgcccaagcacaggcgcagaccggctgggttcaaaaccaaggaatacttccgggtatggtttggcaggacagagatgtgtacctgcaaggacccatttgggccaaaattcctcacacggacggcaactttcacccttctccgctgatgggagggtttggaatgaagcacccgcctcctcagatcctcatcaaaaacacacctgtacctgcggatcctccaacggccttcaacaaggacaagctgaactctttcatcacccagtattctactggccaagtcagcgtggagatcgagtgggagctgcagaaggaaaacagcaagcgctggaacccggagatccagtacacttccaactattacaagtctaataatgttgaatttgctgttaatactgaaggtgtatatagtgaaccccgccccattggcacgcggtatttaacgaggaactta

SEQ ID NO: 25 - DNA, 2226 bp, synthetic construct
  source 1..2226: mol_type = other DNA
atggctgccgatggttatcttccagattggctcgaggacaaccttagtgaaggaattcgcgagtggtgggctttgaaacctggagcccctcaacccaaggcaaatcaacaacatcaagacaacgctcgaggtcttgtgcttccgggttacaaataccttggacccggcaacggactcgacaagggggagccggtcaacgcagcagacgcggcggccctcgagcacgacaaggcctacgaccagcagctcaaggccggagacaacccgtacctcaagtacaaccacgccgacgccgagttccaggagcggctcaaagaagatacgtcttttgggggcaacctcgggcgagcagtcttccaggccaaaaagaggcttcttgaacctcttggtctggttgaggaagcggctaagacggctcctggaaagaagaggcctgtagagcagtctcctcaggaaccggactcctccgcgggtattggcaaatcgggtgcacagcccgctaaaaagagactcaatttcggtcagactggcgacacagagtcagtcccagaccctcaaccaatcggagaacctcccgcagccccctcaggtgtgggatctcttacaatggcttcaggtggtggcgcaccagtggcagacaataacgaaggtgccgatggagtgggtagttcctcgggaaattggcattgcgattcccaatggctgggggacagagtcatcaccaccagcacccgaacctgggccctgcccacctacaacaatcacctctacaagcaaatctccaacagcacatctggaggatcttcaaatgacaacgcctacttcggctacagcaccccctgggggtattttgacttcaacagattccactgccacttctcaccacgtgactggcagcgactcatcaacaacaactggggattccggcctaagcgactcaacttcaagctcttcaacattcaggtcaaagaggttacggacaacaatggagtcaagaccatcgccaataaccttaccagcacggtccaggtcttcacggactcagactatcagctcccgtacgtgctcgggtcggctcacgagggctgcctcccgccgttcccagcggacgttttcatgattcctcagtacgggtatctgacgcttaatgatggaagccaggccgtgggtcgttcgtccttttactgcctggaatatttcccgtcgcaaatgctaagaacgggtaacaacttccagttcagctacgagtttgagaacgtacctttccatagcagctacgctcacagccaaagcctggaccgactaatgaatccactcatcgatcagtatctgtattacttgagtaagacgatttctaagcgtggttctccgcattctaaggcgcagaatcagcagacgttgaagttttcggtagctggtcctagcaacatggctgtccagggaagaaactacatacctggacccagctaccgacaacaacgtgtctcaaccactgtgactcaaaacaacaacagcgaatttgcttggcctggagcttcttcttgggctctcaatggacgtaatagcttgatgaatcctggacctgctatggccagccacaaagaaggagaggaccgtttctttcctttgtctggatctttaatttttggcaaacaaggaactggaagagacaacgtggatgcggacaaagtcatgataaccaacgaagaagaaattaaaactactaacccggtagcaacggagtcctatggacaagtggccacaaaccaccagagtgcccaagcacaggcgcagaccggctgggttcaaaaccaaggaatacttccgggtatggtttggcaggacagagatgtgtacctgcaaggacccatttgggccaaaattcctcacacggacggcaactttcacccttctccgctgatgggagggtttggaatgaagcacccgcctcctcagatcctcatcaaaaacacacctgtacctgcggatcctccaacggccttcaacaaggacaagctgaactctttcatcacccagtattctactggccaagtcagcgtggagatcgagtgggagctgcagaaggaaaacagcaagcgctggaacccggagatccagtacacttccaactattacaagtctaataatgttgaatttgctgttaatactgaaggtgtatatagtgaaccccgccccattggcacgcggtatttaacgaggaactta

SEQ ID NO: 26 - DNA, 2226 bp, synthetic construct
  source 1..2226: mol_type = other DNA
atggctgccgatggttatcttccagattggctcgaggacaaccttagtgaaggaattcgcgagtggtgggctttgaaacctggagcccctcaacccaaggcaaatcaacaacatcaagacaacgctcgaggtcttgtgcttccgggttacaaataccttggacccggcaacggactcgacaagggggagccggtcaacgcagcagacgcggcggccctcgagcacgacaaggcctacgaccagcagctcaaggccggagacaacccgtacctcaagtacaaccacgccgacgccgagttccaggagcggctcaaagaagatacgtcttttgggggcaacctcgggcgagcagtcttccaggccaaaaagaggcttcttgaacctcttggtctggttgaggaagcggctaagacggctcctggaaagaagaggcctgtagagcagtctcctcaggaaccggactcctccgcgggtattggcaaatcgggtgcacagcccgctaaaaagagactcaatttcggtcagactggcgacacagagtcagtcccagaccctcaaccaatcggagaacctcccgcagccccctcaggtgtgggatctcttacaatggcttcaggtggtggcgcaccagtggcagacaataacgaaggtgccgatggagtgggtagttcctcgggaaattggcattgcgattcccaatggctgggggacagagtcatcaccaccagcacccgaacctgggccctgcccacctacaacaatcacctctacaagcaaatctccaacagcacatctggaggatcttcaaatgacaacgcctacttcggctacagcaccccctgggggtattttgacttcaacagattccactgccacttctcaccacgtgactggcagcgactcatcaacaacaactggggattccggcctaagcgactcaacttcaagctcttcaacattcaggtcaaagaggttacggacaacaatggagtcaagaccatcgccaataaccttaccagcacggtccaggtcttcacggactcagactatcagctcccgtacgtgctcgggtcggctcacgagggctgcctcccgccgttcccagcggacgttttcatgattcctcagtacgggtatctgacgcttaatgatggaagccaggccgtgggtcgttcgtccttttactgcctggaatatttcccgtcgcaaatgctaagaacgggtaacaacttccagttcagctacgagtttgagaacgtacctttccatagcagctacgctcacagccaaagcctggaccgactaatgaatccactcatcgatcagtatctgtattacttgagtaagggtctgggtggttctggttctccgcattctaaggcgcagaatcagcagacgttgaagttttcggtagctggtcctagcaacatggctgtccagggaagaaactacatacctggacccagctaccgacaacaacgtgtctcaaccactgtgactcaaaacaacaacagcgaatttgcttggcctggagcttcttcttgggctctcaatggacgtaatagcttgatgaatcctggacctgctatggccagccacaaagaaggagaggaccgtttctttcctttgtctggatctttaatttttggcaaacaaggaactggaagagacaacgtggatgcggacaaagtcatgataaccaacgaagaagaaattaaaactactaacccggtagcaacggagtcctatggacaagtggccacaaaccaccagagtgcccaagcacaggcgcagaccggctgggttcaaaaccaaggaatacttccgggtatggtttggcaggacagagatgtgtacctgcaaggacccatttgggccaaaattcctcacacggacggcaactttcacccttctccgctgatgggagggtttggaatgaagcacccgcctcctcagatcctcatcaaaaacacacctgtacctgcggatcctccaacggccttcaacaaggacaagctgaactctttcatcacccagtattctactggccaagtcagcgtggagatcgagtgggagctgcagaaggaaaacagcaagcgctggaacccggagatccagtacacttccaactattacaagtctaataatgttgaatttgctgttaatactgaaggtgtatatagtgaaccccgccccattggcacgcggtatttaacgaggaactta

SEQ ID NO: 27 - DNA, 2226 bp, synthetic construct
  source 1..2226: mol_type = other DNA
atggctgccgatggttatcttccagattggctcgaggacaaccttagtgaaggaattcgcgagtggtgggctttgaaacctggagcccctcaacccaaggcaaatcaacaacatcaagacaacgctcgaggtcttgtgcttccgggttacaaataccttggacccggcaacggactcgacaagggggagccggtcaacgcagcagacgcggcggccctcgagcacgacaaggcctacgaccagcagctcaaggccggagacaacccgtacctcaagtacaaccacgccgacgccgagttccaggagcggctcaaagaagatacgtcttttgggggcaacctcgggcgagcagtcttccaggccaaaaagaggcttcttgaacctcttggtctggttgaggaagcggctaagacggctcctggaaagaagaggcctgtagagcagtctcctcaggaaccggactcctccgcgggtattggcaaatcgggtgcacagcccgctaaaaagagactcaatttcggtcagactggcgacacagagtcagtcccagaccctcaaccaatcggagaacctcccgcagccccctcaggtgtgggatctcttacaatggcttcaggtggtggcgcaccagtggcagacaataacgaaggtgccgatggagtgggtagttcctcgggaaattggcattgcgattcccaatggctgggggacagagtcatcaccaccagcacccgaacctgggccctgcccacctacaacaatcacctctacaagcaaatctccaacagcacatctggaggatcttcaaatgacaacgcctacttcggctacagcaccccctgggggtattttgacttcaacagattccactgccacttctcaccacgtgactggcagcgactcatcaacaacaactggggattccggcctaagcgactcaacttcaagctcttcaacattcaggtcaaagaggttacggacaacaatggagtcaagaccatcgccaataaccttaccagcacggtccaggtcttcacggactcagactatcagctcccgtacgtgctcgggtcggctcacgagggctgcctcccgccgttcccagcggacgttttcatgattcctcagtacgggtatctgacgcttaatgatggaagccaggccgtgggtcgttcgtccttttactgcctggaatatttcccgtcgcaaatgctaagaacgggtaacaacttccagttcagctacgagtttgagaacgtacctttccatagcagctacgctcacagccaaagcctggaccgactaatgaatccactcatcgatcagtatctgtattacttgagtaagacgattaatggtcatgattctccgcattctaaggcgcagaatctgcagacgttgaagttttcggtagctggtcctagcaacatggctgtccagggaagaaactacatacctggacccagctaccgacaacaacgtgtctcaaccactgtgactcaaaacaacaacagcgaatttgcttggcctggagcttcttcttgggctctcaatggacgtaatagcttgatgaatcctggacctgctatggccagccacaaagaaggagaggaccgtttctttcctttgtctggatctttaatttttggcaaacaaggaactggaagagacaacgtggatgcggacaaagtcatgataaccaacgaagaagaaattaaaactactaacccggtagcaacggagtcctatggacaagtggccacaaaccaccagagtgcccaagcacaggcgcagaccggctgggttcaaaaccaaggaatacttccgggtatggtttggcaggacagagatgtgtacctgcaaggacccatttgggccaaaattcctcacacggacggcaactttcacccttctccgctgatgggagggtttggaatgaagcacccgcctcctcagatcctcatcaaaaacacacctgtacctgcggatcctccaacggccttcaacaaggacaagctgaactctttcatcacccagtattctactggccaagtcagcgtggagatcgagtgggagctgcagaaggaaaacagcaagcgctggaacccggagatccagtacacttccaactattacaagtctaataatgttgaatttgctgttaatactgaaggtgtatatagtgaaccccgccccattggcacgcggtatttaacgaggaactta

SEQ ID NO: 28 - DNA, 2226 bp, synthetic construct
  source 1..2226: mol_type = other DNA
atggctgccgatggttatcttccagattggctcgaggacaaccttagtgaaggaattcgcgagtggtgggctttgaaacctggagcccctcaacccaaggcaaatcaacaacatcaagacaacgctcgaggtcttgtgcttccgggttacaaataccttggacccggcaacggactcgacaagggggagccggtcaacgcagcagacgcggcggccctcgagcacgacaaggcctacgaccagcagctcaaggccggagacaacccgtacctcaagtacaaccacgccgacgccgagttccaggagcggctcaaagaagatacgtcttttgggggcaacctcgggcgagcagtcttccaggccaaaaagaggcttcttgaacctcttggtctggttgaggaagcggctaagacggctcctggaaagaagaggcctgtagagcagtctcctcaggaaccggactcctccgcgggtattggcaaatcgggtgcacagcccgctaaaaagagactcaatttcggtcagactggcgacacagagtcagtcccagaccctcaaccaatcggagaacctcccgcagccccctcaggtgtgggatctcttacaatggcttcaggtggtggcgcaccagtggcagacaataacgaaggtgccgatggagtgggtagttcctcgggaaattggcattgcgattcccaatggctgggggacagagtcatcaccaccagcacccgaacctgggccctgcccacctacaacaatcacctctacaagcaaatctccaacagcacatctggaggatcttcaaatgacaacgcctacttcggctacagcaccccctgggggtattttgacttcaacagattccactgccacttctcaccacgtgactggcagcgactcatcaacaacaactggggattccggcctaagcgactcaacttcaagctcttcaacattcaggtcaaagaggttacggacaacaatggagtcaagaccatcgccaataaccttaccagcacggtccaggtcttcacggactcagactatcagctcccgtacgtgctcgggtcggctcacgagggctgcctcccgccgttcccagcggacgttttcatgattcctcagtacgggtatctgacgcttaatgatggaagccaggccgtgggtcgttcgtccttttactgcctggaatatttcccgtcgcaaatgctaagaacgggtaacaacttccagttcagctacgagtttgagaacgtacctttccatagcagctacgctcacagccaaagcctggaccgactaatgaatccactcatcgatcagtatctgtattacttgagtaagacggtgaatggtcatgattctccgcattctaaggcgcagaatcagcagacgttgaagttttcggtagctggtcctagcaacatggctgtccagggaagaaactacatacctggacccagctaccgacaacaacgtgtctcaaccactgtgactcaaaacaacaacagcgaatttgcttggcctggagcttcttcttgggctctcaatggacgtaatagcttgatgaatcctggacctgctatggccagccacaaagaaggagaggaccgtttctttcctttgtctggatctttaatttttggcaaacaaggaactggaagagacaacgtggatgcggacaaagtcatgataaccaacgaagaagaaattaaaactactaacccggtagcaacggagtcctatggacaagtggccacaaaccaccagagtgcccaagcacaggcgcagaccggctgggttcaaaaccaaggaatacttccgggtatggtttggcaggacagagatgtgtacctgcaaggacccatttgggccaaaattcctcacacggacggcaactttcacccttctccgctgatgggagggtttggaatgaagcacccgcctcctcagatcctcatcaaaaacacacctgtacctgcggatcctccaacggccttcaacaaggacaagctgaactctttcatcacccagtattctactggccaagtcagcgtggagatcgagtgggagctgcagaaggaaaacagcaagcgctggaacccggagatccagtacacttccaactattacaagtctaataatgttgaatttgctgttaatactgaaggtgtatatagtgaaccccgccccattggcacgcggtatttaacgaggaactta

SEQ ID NO: 29 - DNA, 2226 bp, synthetic construct
  source 1..2226: mol_type = other DNA
atggctgccgatggttatcttccagattggctcgaggacaaccttagtgaaggaattcgcgagtggtgggctttgaaacctggagcccctcaacccaaggcaaatcaacaacatcaagacaacgctcgaggtcttgtgcttccgggttacaaataccttggacccggcaacggactcgacaagggggagccggtcaacgcagcagacgcggcggccctcgagcacgacaaggcctacgaccagcagctcaaggccggagacaacccgtacctcaagtacaaccacgccgacgccgagttccaggagcggctcaaagaagatacgtcttttgggggcaacctcgggcgagcagtcttccaggccaaaaagaggcttcttgaacctcttggtctggttgaggaagcggctaagacggctcctggaaagaagaggcctgtagagcagtctcctcaggaaccggactcctccgcgggtattggcaaatcgggtgcacagcccgctaaaaagagactcaatttcggtcagactggcgacacagagtcagtcccagaccctcaaccaatcggagaacctcccgcagccccctcaggtgtgggatctcttacaatggcttcaggtggtggcgcaccagtggcagacaataacgaaggtgccgatggagtgggtagttcctcgggaaattggcattgcgattcccaatggctgggggacagagtcatcaccaccagcacccgaacctgggccctgcccacctacaacaatcacctctacaagcaaatctccaacagcacatctggaggatcttcaaatgacaacgcctacttcggctacagcaccccctgggggtattttgacttcaacagattccactgccacttctcaccacgtgactggcagcgactcatcaacaacaactggggattccggcctaagcgactcaacttcaagctcttcaacattcaggtcaaagaggttacggacaacaatggagtcaagaccatcgccaataaccttaccagcacggtccaggtcttcacggactcagactatcagctcccgtacgtgctcgggtcggctcacgagggctgcctcccgccgttcccagcggacgttttcatgattcctcagtacgggtatctgacgcttaatgatggaagccaggccgtgggtcgttcgtccttttactgcctggaatatttcccgtcgcaaatgctaagaacgggtaacaacttccagttcagctacgagtttgagaacgtacctttccatagcagctacgctcacagccaaagcctggaccgactaatgaatccactcatcgatcagtatctgtattacttgagtaagacgattaatggtcatgattctccgcattctaaggcgctgaatcagcagacgttgaagttttcggtagctggtcctagcaacatggctgtccagggaagaaactacatacctggacccagctaccgacaacaacgtgtctcaaccactgtgactcaaaacaacaacagcgaatttgcttggcctggagcttcttcttgggctctcaatggacgtaatagcttgatgaatcctggacctgctatggccagccacaaagaaggagaggaccgtttctttcctttgtctggatctttaatttttggcaaacaaggaactggaagagacaacgtggatgcggacaaagtcatgataaccaacgaagaagaaattaaaactactaacccggtagcaacggagtcctatggacaagtggccacaaaccaccagagtgcccaagcacaggcgcagaccggctgggttcaaaaccaaggaatacttccgggtatggtttggcaggacagagatgtgtacctgcaaggacccatttgggccaaaattcctcacacggacggcaactttcacccttctccgctgatgggagggtttggaatgaagcacccgcctcctcagatcctcatcaaaaacacacctgtacctgcggatcctccaacggccttcaacaaggacaagctgaactctttcatcacccagtattctactggccaagtcagcgtggagatcgagtgggagctgcagaaggaaaacagcaagcgctggaacccggagatccagtacacttccaactattacaagtctaataatgttgaatttgctgttaatactgaaggtgtatatagtgaaccccgccccattggcacgcggtatttaacgaggaactta

SEQ ID NO: 30 - DNA, 2226 bp, synthetic construct
  source 1..2226: mol_type = other DNA
atggctgccgatggttatcttccagattggctcgaggacaaccttagtgaaggaattcgcgagtggtgggctttgaaacctggagcccctcaacccaaggcaaatcaacaacatcaagacaacgctcgaggtcttgtgcttccgggttacaaataccttggacccggcaacggactcgacaagggggagccggtcaacgcagcagacgcggcggccctcgagcacgacaaggcctacgaccagcagctcaaggccggagacaacccgtacctcaagtacaaccacgccgacgccgagttccaggagcggctcaaagaagatacgtcttttgggggcaacctcgggcgagcagtcttccaggccaaaaagaggcttcttgaacctcttggtctggttgaggaagcggctaagacggctcctggaaagaagaggcctgtagagcagtctcctcaggaaccggactcctccgcgggtattggcaaatcgggtgcacagcccgctaaaaagagactcaatttcggtcagactggcgacacagagtcagtcccagaccctcaaccaatcggagaacctcccgcagccccctcaggtgtgggatctcttacaatggcttcaggtggtggcgcaccagtggcagacaataacgaaggtgccgatggagtgggtagttcctcgggaaattggcattgcgattcccaatggctgggggacagagtcatcaccaccagcacccgaacctgggccctgcccacctacaacaatcacctctacaagcaaatctccaacagcacatctggaggatcttcaaatgacaacgcctacttcggctacagcaccccctgggggtattttgacttcaacagattccactgccacttctcaccacgtgactggcagcgactcatcaacaacaactggggattccggcctaagcgactcaacttcaagctcttcaacattcaggtcaaagaggttacggacaacaatggagtcaagaccatcgccaataaccttaccagcacggtccaggtcttcacggactcagactatcagctcccgtacgtgctcgggtcggctcacgagggctgcctcccgccgttcccagcggacgttttcatgattcctcagtacgggtatctgacgcttaatgatggaagccaggccgtgggtcgttcgtccttttactgcctggaatatttcccgtcgcaaatgctaagaacgggtaacaacttccagttcagctacgagtttgagaacgtacctttccatagcagctacgctcacagccaaagcctggaccgactaatgaatccactcatcgatcagtatctgtattacttgagtaagacgattaatggtcatgattctccgcattctaaggcgcagaatcagcagtctttgaagttttcggtagctggtcctagcaacatggctgtccagggaagaaactacatacctggacccagctaccgacaacaacgtgtctcaaccactgtgactcaaaacaacaacagcgaatttgcttggcctggagcttcttcttgggctctcaatggacgtaatagcttgatgaatcctggacctgctatggccagccacaaagaaggagaggaccgtttctttcctttgtctggatctttaatttttggcaaacaaggaactggaagagacaacgtggatgcggacaaagtcatgataaccaacgaagaagaaattaaaactactaacccggtagcaacggagtcctatggacaagtggccacaaaccaccagagtgcccaagcacaggcgcagaccggctgggttcaaaaccaaggaatacttccgggtatggtttggcaggacagagatgtgtacctgcaaggacccatttgggccaaaattcctcacacggacggcaactttcacccttctccgctgatgggagggtttggaatgaagcacccgcctcctcagatcctcatcaaaaacacacctgtacctgcggatcctccaacggccttcaacaaggacaagctgaactctttcatcacccagtattctactggccaagtcagcgtggagatcgagtgggagctgcagaaggaaaacagcaagcgctggaacccggagatccagtacacttccaactattacaagtctaataatgttgaatttgctgttaatactgaaggtgtatatagtgaaccccgccccattggcacgcggtatttaacgaggaactta

SEQ ID NO: 31 - DNA, 2226 bp, synthetic construct
  source 1..2226: mol_type = other DNA
atggctgccgatggttatcttccagattggctcgaggacaaccttagtgaaggaattcgcgagtggtgggctttgaaacctggagcccctcaacccaaggcaaatcaacaacatcaagacaacgctcgaggtcttgtgcttccgggttacaaataccttggacccggcaacggactcgacaagggggagccggtcaacgcagcagacgcggcggccctcgagcacgacaaggcctacgaccagcagctcaaggccggagacaacccgtacctcaagtacaaccacgccgacgccgagttccaggagcggctcaaagaagatacgtcttttgggggcaacctcgggcgagcagtcttccaggccaaaaagaggcttcttgaacctcttggtctggttgaggaagcggctaagacggctcctggaaagaagaggcctgtagagcagtctcctcaggaaccggactcctccgcgggtattggcaaatcgggtgcacagcccgctaaaaagagactcaatttcggtcagactggcgacacagagtcagtcccagaccctcaaccaatcggagaacctcccgcagccccctcaggtgtgggatctcttacaatggcttcaggtggtggcgcaccagtggcagacaataacgaaggtgccgatggagtgggtagttcctcgggaaattggcattgcgattcccaatggctgggggacagagtcatcaccaccagcacccgaacctgggccctgcccacctacaacaatcacctctacaagcaaatctccaacagcacatctggaggatcttcaaatgacaacgcctacttcggctacagcaccccctgggggtattttgacttcaacagattccactgccacttctcaccacgtgactggcagcgactcatcaacaacaactggggattccggcctaagcgactcaacttcaagctcttcaacattcaggtcaaagaggttacggacaacaatggagtcaagaccatcgccaataaccttaccagcacggtccaggtcttcacggactcagactatcagctcccgtacgtgctcgggtcggctcacgagggctgcctcccgccgttcccagcggacgttttcatgattcctcagtacgggtatctgacgcttaatgatggaagccaggccgtgggtcgttcgtccttttactgcctggaatatttcccgtcgcaaatgctaagaacgggtaacaacttccagttcagctacgagtttgagaacgtacctttccatagcagctacgctcacagccaaagcctggaccgactaatgaatccactcatcgatcagtatctgtattacttgagtaagacgattaatggtcatgattctccgcattctaaggcgcagaatcagcagattttgaagttttcggtagctggtcctagcaacatggctgtccagggaagaaactacatacctggacccagctaccgacaacaacgtgtctcaaccactgtgactcaaaacaacaacagcgaatttgcttggcctggagcttcttcttgggctctcaatggacgtaatagcttgatgaatcctggacctgctatggccagccacaaagaaggagaggaccgtttctttcctttgtctggatctttaatttttggcaaacaaggaactggaagagacaacgtggatgcggacaaagtcatgataaccaacgaagaagaaattaaaactactaacccggtagcaacggagtcctatggacaagtggccacaaaccaccagagtgcccaagcacaggcgcagaccggctgggttcaaaaccaaggaatacttccgggtatggtttggcaggacagagatgtgtacctgcaaggacccatttgggccaaaattcctcacacggacggcaactttcacccttctccgctgatgggagggtttggaatgaagcacccgcctcctcagatcctcatcaaaaacacacctgtacctgcggatcctccaacggccttcaacaaggacaagctgaactctttcatcacccagtattctactggccaagtcagcgtggagatcgagtgggagctgcagaaggaaaacagcaagcgctggaacccggagatccagtacacttccaactattacaagtctaataatgttgaatttgctgttaatactgaaggtgtatatagtgaaccccgccccattggcacgcggtatttaacgaggaactta

SEQ ID NO: 32 - DNA, 2226 bp, synthetic construct
  source 1..2226: mol_type = other DNA
atggctgccgatggttatcttccagattggctcgaggacaaccttagtgaaggaattcgcgagtggtgggctttgaaacctggagcccctcaacccaaggcaaatcaacaacatcaagacaacgctcgaggtcttgtgcttccgggttacaaataccttggacccggcaacggactcgacaagggggagccggtcaacgcagcagacgcggcggccctcgagcacgacaaggcctacgaccagcagctcaaggccggagacaacccgtacctcaagtacaaccacgccgacgccgagttccaggagcggctcaaagaagatacgtcttttgggggcaacctcgggcgagcagtcttccaggccaaaaagaggcttcttgaacctcttggtctggttgaggaagcggctaagacggctcctggaaagaagaggcctgtagagcagtctcctcaggaaccggactcctccgcgggtattggcaaatcgggtgcacagcccgctaaaaagagactcaatttcggtcagactggcgacacagagtcagtcccagaccctcaaccaatcggagaacctcccgcagccccctcaggtgtgggatctcttacaatggcttcaggtggtggcgcaccagtggcagacaataacgaaggtgccgatggagtgggtagttcctcgggaaattggcattgcgattcccaatggctgggggacagagtcatcaccaccagcacccgaacctgggccctgcccacctacaacaatcacctctacaagcaaatctccaacagcacatctggaggatcttcaaatgacaacgcctacttcggctacagcaccccctgggggtattttgacttcaacagattccactgccacttctcaccacgtgactggcagcgactcatcaacaacaactggggattccggcctaagcgactcaacttcaagctcttcaacattcaggtcaaagaggttacggacaacaatggagtcaagaccatcgccaataaccttaccagcacggtccaggtcttcacggactcagactatcagctcccgtacgtgctcgggtcggctcacgagggctgcctcccgccgttcccagcggacgttttcatgattcctcagtacgggtatctgacgcttaatgatggaagccaggccgtgggtcgttcgtccttttactgcctggaatatttcccgtcgcaaatgctaagaacgggtaacaacttccagttcagctacgagtttgagaacgtacctttccatagcagctacgctcacagccaaagcctggaccgactaatgaatccactcatcgatcagtatctgtattacttgagtaagacgattaatggttctggttctccgcattttacgcgtcagaatcagcagacgttgaagttttcggtagctggtcctagcaacatggctgtccagggaagaaactacatacctggacccagctaccgacaacaacgtgtctcaaccactgtgactcaaaacaacaacagcgaatttgcttggcctggagcttcttcttgggctctcaatggacgtaatagcttgatgaatcctggacctgctatggccagccacaaagaaggagaggaccgtttctttcctttgtctggatctttaatttttggcaaacaaggaactggaagagacaacgtggatgcggacaaagtcatgataaccaacgaagaagaaattaaaactactaacccggtagcaacggagtcctatggacaagtggccacaaaccaccagagtgcccaagcacaggcgcagaccggctgggttcaaaaccaaggaatacttccgggtatggtttggcaggacagagatgtgtacctgcaaggacccatttgggccaaaattcctcacacggacggcaactttcacccttctccgctgatgggagggtttggaatgaagcacccgcctcctcagatcctcatcaaaaacacacctgtacctgcggatcctccaacggccttcaacaaggacaagctgaactctttcatcacccagtattctactggccaagtcagcgtggagatcgagtgggagctgcagaaggaaaacagcaagcgctggaacccggagatccagtacacttccaactattacaagtctaataatgttgaatttgctgttaatactgaaggtgtatatagtgaaccccgccccattggcacgcggtatttaacgaggaactta

SEQ ID NO: 33 - DNA, 2226 bp, synthetic construct
  source 1..2226: mol_type = other DNA
atggctgccgatggttatcttccagattggctcgaggacaaccttagtgaaggaattcgcgagtggtgggctttgaaacctggagcccctcaacccaaggcaaatcaacaacatcaagacaacgctcgaggtcttgtgcttccgggttacaaataccttggacccggcaacggactcgacaagggggagccggtcaacgcagcagacgcggcggccctcgagcacgacaaggcctacgaccagcagctcaaggccggagacaacccgtacctcaagtacaaccacgccgacgccgagttccaggagcggctcaaagaagatacgtcttttgggggcaacctcgggcgagcagtcttccaggccaaaaagaggcttcttgaacctcttggtctggttgaggaagcggctaagacggctcctggaaagaagaggcctgtagagcagtctcctcaggaaccggactcctccgcgggtattggcaaatcgggtgcacagcccgctaaaaagagactcaatttcggtcagactggcgacacagagtcagtcccagaccctcaaccaatcggagaacctcccgcagccccctcaggtgtgggatctcttacaatggcttcaggtggtggcgcaccagtggcagacaataacgaaggtgccgatggagtgggtagttcctcgggaaattggcattgcgattcccaatggctgggggacagagtcatcaccaccagcacccgaacctgggccctgcccacctacaacaatcacctctacaagcaaatctccaacagcacatctggaggatcttcaaatgacaacgcctacttcggctacagcaccccctgggggtattttgacttcaacagattccactgccacttctcaccacgtgactggcagcgactcatcaacaacaactggggattccggcctaagcgactcaacttcaagctcttcaacattcaggtcaaagaggttacggacaacaatggagtcaagaccatcgccaataaccttaccagcacggtccaggtcttcacggactcagactatcagctcccgtacgtgctcgggtcggctcacgagggctgcctcccgccgttcccagcggacgttttcatgattcctcagtacgggtatctgacgcttaatgatggaagccaggccgtgggtcgttcgtccttttactgcctggaatatttcccgtcgcaaatgctaagaacgggtaacaacttccagttcagctacgagtttgagaacgtacctttccatagcagctacgctcacagccaaagcctggaccgactaatgaatccactcatcgatcagtatctgtattacttgagtaagacgtctaatggtcatgattctccgcattctaaggcgcagaatcagcagacgttgaagttttcggtagctggtcctagcaacatggctgtccagggaagaaactacatacctggacccagctaccgacaacaacgtgtctcaaccactgtgactcaaaacaacaacagcgaatttgcttggcctggagcttcttcttgggctctcaatggacgtaatagcttgatgaatcctggacctgctatggccagccacaaagaaggagaggaccgtttctttcctttgtctggatctttaatttttggcaaacaaggaactggaagagacaacgtggatgcggacaaagtcatgataaccaacgaagaagaaattaaaactactaacccggtagcaacggagtcctatggacaagtggccacaaaccaccagagtgcccaagcacaggcgcagaccggctgggttcaaaaccaaggaatacttccgggtatggtttggcaggacagagatgtgtacctgcaaggacccatttgggccaaaattcctcacacggacggcaactttcacccttctccgctgatgggagggtttggaatgaagcacccgcctcctcagatcctcatcaaaaacacacctgtacctgcggatcctccaacggccttcaacaaggacaagctgaactctttcatcacccagtattctactggccaagtcagcgtggagatcgagtgggagctgcagaaggaaaacagcaagcgctggaacccggagatccagtacacttccaactattacaagtctaataatgttgaatttgctgttaatactgaaggtgtatatagtgaaccccgccccattggcacgcggtatttaacgaggaactta

SEQ ID NO: 34 - DNA, 2226 bp, synthetic construct
  source 1..2226: mol_type = other DNA
atggctgccgatggttatcttccagattggctcgaggacaaccttagtgaaggaattcgcgagtggtgggctttgaaacctggagcccctcaacccaaggcaaatcaacaacatcaagacaacgctcgaggtcttgtgcttccgggttacaaataccttggacccggcaacggactcgacaagggggagccggtcaacgcagcagacgcggcggccctcgagcacgacaaggcctacgaccagcagctcaaggccggagacaacccgtacctcaagtacaaccacgccgacgccgagttccaggagcggctcaaagaagatacgtcttttgggggcaacctcgggcgagcagtcttccaggccaaaaagaggcttcttgaacctcttggtctggttgaggaagcggctaagacggctcctggaaagaagaggcctgtagagcagtctcctcaggaaccggactcctccgcgggtattggcaaatcgggtgcacagcccgctaaaaagagactcaatttcggtcagactggcgacacagagtcagtcccagaccctcaaccaatcggagaacctcccgcagccccctcaggtgtgggatctcttacaatggcttcaggtggtggcgcaccagtggcagacaataacgaaggtgccgatggagtgggtagttcctcgggaaattggcattgcgattcccaatggctgggggacagagtcatcaccaccagcacccgaacctgggccctgcccacctacaacaatcacctctacaagcaaatctccaacagcacatctggaggatcttcaaatgacaacgcctacttcggctacagcaccccctgggggtattttgacttcaacagattccactgccacttctcaccacgtgactggcagcgactcatcaacaacaactggggattccggcctaagcgactcaacttcaagctcttcaacattcaggtcaaagaggttacggacaacaatggagtcaagaccatcgccaataaccttaccagcacggtccaggtcttcacggactcagactatcagctcccgtacgtgctcgggtcggctcacgagggctgcctcccgccgttcccagcggacgttttcatgattcctcagtacgggtatctgacgcttaatgatggaagccaggccgtgggtcgttcgtccttttactgcctggaatatttcccgtcgcaaatgctaagaacgggtaacaacttccagttcagctacgagtttgagaacgtacctttccatagcagctacgctcacagccaaagcctggaccgactaatgaatccactcatcgatcagtatctgtattacttgagtaagacgattaatggttctggttctccgcattctctgccgtggaatcagcagacgttgaagttttcggtagctggtcctagcaacatggctgtccagggaagaaactacatacctggacccagctaccgacaacaacgtgtctcaaccactgtgactcaaaacaacaacagcgaatttgcttggcctggagcttcttcttgggctctcaatggacgtaatagcttgatgaatcctggacctgctatggccagccacaaagaaggagaggaccgtttctttcctttgtctggatctttaatttttggcaaacaaggaactggaagagacaacgtggatgcggacaaagtcatgataaccaacgaagaagaaattaaaactactaacccggtagcaacggagtcctatggacaagtggccacaaaccaccagagtgcccaagcacaggcgcagaccggctgggttcaaaaccaaggaatacttccgggtatggtttggcaggacagagatgtgtacctgcaaggacccatttgggccaaaattcctcacacggacggcaactttcacccttctccgctgatgggagggtttggaatgaagcacccgcctcctcagatcctcatcaaaaacacacctgtacctgcggatcctccaacggccttcaacaaggacaagctgaactctttcatcacccagtattctactggccaagtcagcgtggagatcgagtgggagctgcagaaggaaaacagcaagcgctggaacccggagatccagtacacttccaactattacaagtctaataatgttgaatttgctgttaatactgaaggtgtatatagtgaaccccgccccattggcacgcggtatttaacgaggaactta

SEQ ID NO: 35 - DNA, 2226 bp, synthetic construct
  source 1..2226: mol_type = other DNA
atggctgccgatggttatcttccagattggctcgaggacaaccttagtgaaggaattcgcgagtggtgggctttgaaacctggagcccctcaacccaaggcaaatcaacaacatcaagacaacgctcgaggtcttgtgcttccgggttacaaataccttggacccggcaacggactcgacaagggggagccggtcaacgcagcagacgcggcggccctcgagcacgacaaggcctacgaccagcagctcaaggccggagacaacccgtacctcaagtacaaccacgccgacgccgagttccaggagcggctcaaagaagatacgtcttttgggggcaacctcgggcgagcagtcttccaggccaaaaagaggcttcttgaacctcttggtctggttgaggaagcggctaagacggctcctggaaagaagaggcctgtagagcagtctcctcaggaaccggactcctccgcgggtattggcaaatcgggtgcacagcccgctaaaaagagactcaatttcggtcagactggcgacacagagtcagtcccagaccctcaaccaatcggagaacctcccgcagccccctcaggtgtgggatctcttacaatggcttcaggtggtggcgcaccagtggcagacaataacgaaggtgccgatggagtgggtagttcctcgggaaattggcattgcgattcccaatggctgggggacagagtcatcaccaccagcacccgaacctgggccctgcccacctacaacaatcacctctacaagcaaatctccaacagcacatctggaggatcttcaaatgacaacgcctacttcggctacagcaccccctgggggtattttgacttcaacagattccactgccacttctcaccacgtgactggcagcgactcatcaacaacaactggggattccggcctaagcgactcaacttcaagctcttcaacattcaggtcaaagaggttacggacaacaatggagtcaagaccatcgccaataaccttaccagcacggtccaggtcttcacggactcagactatcagctcccgtacgtgctcgggtcggctcacgagggctgcctcccgccgttcccagcggacgttttcatgattcctcagtacgggtatctgacgcttaatgatggaagccaggccgtgggtcgttcgtccttttactgcctggaatatttcccgtcgcaaatgctaagaacgggtaacaacttccagttcagctacgagtttgagaacgtacctttccatagcagctacgctcacagccaaagcctggaccgactaatgaatccactcatcgatcagtatctgtattacttgagtaagacgattaatggtcatgattctccgcattctaaggcgcagaatcatcagacgttgaagttttcggtagctggtcctagcaacatggctgtccagggaagaaactacatacctggacccagctaccgacaacaacgtgtctcaaccactgtgactcaaaacaacaacagcgaatttgcttggcctggagcttcttcttgggctctcaatggacgtaatagcttgatgaatcctggacctgctatggccagccacaaagaaggagaggaccgtttctttcctttgtctggatctttaatttttggcaaacaaggaactggaagagacaacgtggatgcggacaaagtcatgataaccaacgaagaagaaattaaaactactaacccggtagcaacggagtcctatggacaagtggccacaaaccaccagagtgcccaagcacaggcgcagaccggctgggttcaaaaccaaggaatacttccgggtatggtttggcaggacagagatgtgtacctgcaaggacccatttgggccaaaattcctcacacggacggcaactttcacccttctccgctgatgggagggtttggaatgaagcacccgcctcctcagatcctcatcaaaaacacacctgtacctgcggatcctccaacggccttcaacaaggacaagctgaactctttcatcacccagtattctactggccaagtcagcgtggagatcgagtgggagctgcagaaggaaaacagcaagcgctggaacccggagatccagtacacttccaactattacaagtctaataatgttgaatttgctgttaatactgaaggtgtatatagtgaaccccgccccattggcacgcggtatttaacgaggaactta

SEQ ID NO: 36 - protein, 742 aa, synthetic construct
MAADGYLPDWLEDNLSEGIREWWALKPGAPQPKANQQHQDNARGLVLPGYKYLGPGNGLDKGEPVNAADAAALEHDKAYDQQLKAGDNPYLKYNHADAEFQERLKEDTSFGGNLGRAVFQAKKRLLEPLGLVEEAAKTAPGKKRPVEQSPQEPDSSAGIGKSGAQPAKKRLNFGQTGDTESVPDPQPIGEPPAAPSGVGSLTMASGGGAPVADNNEGADGVGSSSGNWHCDSQWLGDRVITTSTRTWALPTYNNHLYKQISNSTSGGSSNDNAYFGYSTPWGYFDFNRFHCHFSPRDWQRLINNNWGFRPKRLNFKLFNIQVKEVTDNNGVKTIANNLTSTVQVFTDSDYQLPYVLGSAHEGCLPPFPADVFMIPQYGYLTLNDGSQAVGRSSFYCLEYFPSQMLRTGNNFQFSYEFENVPFHSSYAHSQSLDRLMNPLIDQYLYYLSKTERVSGSPHSKAQNQQTLKFSVAGPSNMAVQGRNYIPGPSYRQQRVSTTVTQNNNSEFAWPGASSWALNGRNSLMNPGPAMASHKEGEDRFFPLSGSLIFGKQGTGRDNVDADKVMITNEEEIKTTNPVATESYGQVATNHQSAQAQAQTGWVQNQGILPGMVWQDRDVYLQGPIWAKIPHTDGNFHPSPLMGGFGMKHPPPQILIKNTPVPADPPTAFNKDKLNSFITQYSTGQVSVEIEWELQKENSKRWNPEIQYTSNYYKSNNVEFAVNTEGVYSEPRPIGTRYLTRNL

SEQ ID NO: 37 - protein, 742 aa, synthetic construct
MAADGYLPDWLEDNLSEGIREWWALKPGAPQPKANQQHQDNARGLVLPGYKYLGPGNGLDKGEPVNAADAAALEHDKAYDQQLKAGDNPYLKYNHADAEFQERLKEDTSFGGNLGRAVFQAKKRLLEPLGLVEEAAKTAPGKKRPVEQSPQEPDSSAGIGKSGAQPAKKRLNFGQTGDTESVPDPQPIGEPPAAPSGVGSLTMASGGGAPVADNNEGADGVGSSSGNWHCDSQWLGDRVITTSTRTWALPTYNNHLYKQISNSTSGGSSNDNAYFGYSTPWGYFDFNRFHCHFSPRDWQRLINNNWGFRPKRLNFKLFNIQVKEVTDNNGVKTIANNLTSTVQVFTDSDYQLPYVLGSAHEGCLPPFPADVFMIPQYGYLTLNDGSQAVGRSSFYCLEYFPSQMLRTGNNFQFSYEFENVPFHSSYAHSQSLDRLMNPLIDQYLYYLSKAEIGHDSPHKSGQNQQTLKFSVAGPSNMAVQGRNYIPGPSYRQQRVSTTVTQNNNSEFAWPGASSWALNGRNSLMNPGPAMASHKEGEDRFFPLSGSLIFGKQGTGRDNVDADKVMITNEEEIKTTNPVATESYGQVATNHQSAQAQAQTGWVQNQGILPGMVWQDRDVYLQGPIWAKIPHTDGNFHPSPLMGGFGMKHPPPQILIKNTPVPADPPTAFNKDKLNSLITQYSTGQVSVEIEWELQKENSKRWNPEIQYTSNYYKSNNVEFAVNTEGVYSEPRPIGTRYLTRNL

SEQ ID NO: 38 - protein, 742 aa, synthetic construct
MAADGYLPDWLEDNLSEGIREWWALKPGAPQPKANQQHQDNARGLVLPGYKYLGPGNGLDKGEPVNAADAAALEHDKAYDQQLKAGDNPYLKYNHADAEFQERLKEDTSFGGNLGRAVFQAKKRLLEPLGLVEEAAKTAPGKKRPVEQSPQEPDSSAGIGKSGAQPAKKRLNFGQTGDTESVPDPQPIGEPPAAPSGVGSLTMASGGGAPVADNNEGADGVGSSSGNWHCDSQWLGDRVITTSTRTWALPTYNNHLYKQISNSTSGGSSNDNAYFGYSTPWGYFDFNRFHCHFSPRDWQRLINNNWGFRPKRLNFKLFNIQVKEVTDNNGVKTIANNLTSTVQVFTDSDYQLPYVLGSAHEGCLPPFPADVFMIPQYGYLTLNDGSQAVGRSSFYCLEYFPSQMLRTGNNFQFSYEFENVPFHSSYAHSQSLDRLMNPLIDQYLYYLSKTIIGSGSPHSKAQNRHTLKFSVAGPSNMAVQGRNYIPGPSYRQQRVSTTVTQNNNSEFAWPGASSWALNGRNSLMNPGPAMASHKEGEDRFFPLSGSLIFGKQGTGRDNVDADKVMITNEEEIKTTNPVATESYGQVATNHQSAQAQAQTGWVQNQGILPGMVWQDRDVYLQGPIWAKIPHTDGNFHPSPLMGGFGMKHPPPQILIKNTPVPADPPTAFNKDKLNSFITQYSTGQVSVEIEWELQKENSKRWNPEIQYTSNYYKSNNVEFAVNTEGVYSEPRPIGTRYLTRNL

SEQ ID NO: 39 - protein, 742 aa, synthetic construct
MAADGYLPDWLEDNLSEGIREWWALKPGAPQPKANQQHQDNARGLVLPGYKYLGPGNGLDKGEPVNAADAAALEHDKAYDQQLKAGDNPYLKYNHADAEFQERLKEDTSFGGNLGRAVFQAKKRLLEPLGLVEEAAKTAPGKKRPVEQSPQEPDSSAGIGKSGAQPAKKRLNFGQTGDTESVPDPQPIGEPPAAPSGVGSLTMASGGGAPVADNNEGADGVGSSSGNWHCDSQWLGDRVITTSTRTWALPTYNNHLYKQISNSTSGGSSNDNAYFGYSTPWGYFDFNRFHCHFSPRDWQRLINNNWGFRPKRLNFKLFNIQVKEVTDNNGVKTIANNLTSTVQVFTDSDYQLPYVLGSAHEGCLPPFPADVFMIPQYGYLTLNDGSQAVGRSSFYCLEYFPSQMLRTGNNFQFSYEFENVPFHSSYAHSQSLDRLMNPLIDQYLYYLSKTEKMSGSPHSKAQNQQTLKFSVAGPSNMAVQGRNYIPGPSYRQQRVSTTVTQNNNSEFAWPGASSWALNGRNSLMNPGPAMASHKEGEDRFFPLSGSLIFGKQGTGRDNVDADKVMITNEEEIKTTNPVATESYGQVATNHQSAQAQAQTGWVQNQGILPGMVWQDRDVYLQGPIWAKIPHTDGNFHPSPLMGGFGMKHPPPQILIKNTPVPADPPTAFNKDKLNSFITQYSTGQVSVEIEWELQKENSKRWNPEIQYTSNYYKSNNVEFAVNTEGVYSEPRPIGTRYLTRNL

SEQ ID NO: 40 - protein, 742 aa, synthetic construct
MAADGYLPDWLEDNLSEGIREWWALKPGAPQPKANQQHQDNARGLVLPGYKYLGPGNGLDKGEPVNAADAAALEHDKAYDQQLKAGDNPYLKYNHADAEFQERLKEDTSFGGNLGRAVFQAKKRLLEPLGLVEEAAKTAPGKKRPVEQSPQEPDSSAGIGKSGAQPAKKRLNFGQTGDTESVPDPQPIGEPPAAPSGVGSLTMASGGGAPVADNNEGADGVGSSSGNWHCDSQWLGDRVITTSTRTWALPTYNNHLYKQISNSTSGGSSNDNAYFGYSTPWGYFDFNRFHCHFSPRDWQRLINNNWGFRPKRLNFKLFNIQVKEVTDNNGVKTIANNLTSTVQVFTDSDYQLPYVLGSAHEGCLPPFPADVFMIPQYGYLTLNDGSQAVGRSSFYCLEYFPSQMLRTGNNFQFSYEFENVPFHSSYAHSQSLDRLMNPLIDQYLYYLSKEINGRGSPHSKAQNQQTLKFSVAGPSNMAVQGRNYIPGPSYRQQRVSTTVTQNNNSEFAWPGASSWALNGRNSLMNPGPAMASHKEGEDRFFPLSGSLIFGKQGTGRDNVDADKVMITNEEEIKTTNPVATESYGQVATNHQSAQAQAQTGWVQNQGILPGMVWQDRDVYLQGPIWAKIPHTDGNFHPSPLMGGFGMKHPPPQILIKNTPVPADPPTAFNKDKLNSFITQYSTGQVSVEIEWELQKENSKRWNPEIQYTSNYYKSNNVEFAVNTEGVYSEPRPIGTRYLTRNL

SEQ ID NO: 41 - protein, 742 aa, synthetic construct
MAADGYLPDWLEDNLSEGIREWWALKPGAPQPKANQQHQDNARGLVLPGYKYLGPGNGLDKGEPVNAADAAALEHDKAYDQQLKAGDNPYLKYNHADAEFQERLKEDTSFGGNLGRAVFQAKKRLLEPLGLVEEAAKTAPGKKRPVEQSPQEPDSSAGIGKSGAQPAKKRLNFGQTGDTESVPDPQPIGEPPAAPSGVGSLTMASGGGAPVADNNEGADGVGSSSGNWHCDSQWLGDRVITTSTRTWALPTYNNHLYKQISNSTSGGSSNDNAYFGYSTPWGYFDFNRFHCHFSPRDWQRLINNNWGFRPKRLNFKLFNIQVKEVTDNNGVKTIANNLTSTVQVFTDSDYQLPYVLGSAHEGCLPPFPADVFMIPQYGYLTLNDGSQAVGRSSFYCLEYFPSQMLRTGNNFQFSYEFENVPFHSSYAHSQSLDRLMNPLIDQYLYYLSKTFNGSGSPHSKAPNLQTLKFSVAGPSNMAVQGRNYIPGPSYRQQRVSTTVTQNNNSEFAWPGASSWALNGRNSLMNPGPAMASHKEGEDRFFPLSGSLIFGKQGTGRDNVDADKVMITNEEEIKTTNPVATESYGQVATNHQSAQAQAQTGWVQNQGILPGMVWQDRDVYLQGPIWAKIPHTDGNFHPSPLMGGFGMKHPPPQILIKNTPVPADPPTAFNKDKLNSFITQYSTGQVSVEIEWELQKENSKRWNPEIQYTSNYYKSNNVEFAVNTEGVYSEPRPIGTRYLTRNL

SEQ ID NO: 42 - protein, 742 aa, synthetic construct
MAADGYLPDWLEDNLSEGIREWWALKPGAPQPKANQQHQDNARGLVLPGYKYLGPGNGLDKGEPVNAADAAALEHDKAYDQQLKAGDNPYLKYNHADAEFQERLKEDTSFGGNLGRAVFQAKKRLLEPLGLVEEAAKTAPGKKRPVEQSPQEPDSSAGIGKSGAQPAKKRLNFGQTGDTESVPDPQPIGEPPAAPSGVGSLTMASGGGAPVADNNEGADGVGSSSGNWHCDSQWLGDRVITTSTRTWALPTYNNHLYKQISNSTSGGSSNDNAYFGYSTPWGYFDFNRFHCHFSPRDWQRLINNNWGFRPKRLNFKLFNIQVKEVTDNNGVKTIANNLTSTVQVFTDSDYQLPYVLGSAHEGCLPPFPADVFMIPQYGYLTLNDGSQAVGRSSFYCLEYFPSQMLRTGNNFQFSYEFENVPFHSSYAHSQSLDRLMNPLIDQYLYYLSKTEKTSGSPHSKAQNQQTLKFSVAGPSNMAVQGRNYIPGPSYRQQRVSTTVTQNNNSEFAWPGASSWALNGRNSLMNPGPAMASHKEGEDRFFPLSGSLIFGKQGTGRDNVDADKVMITNEEEIKTTNPVATESYGQVATNHQSAQAQAQTGWVQNQGILPGMVWQDRDVYLQGPIWAKIPHTDGNFHPSPLMGGFGMKHPPPQILIKNTPVPADPPTAFNKDKLNSFITQYSTGQVSVEIEWELQKENSKRWNPEIQYTSNYYKSNNVEFAVNTEGVYSEPRPIGTRYLTRNL

SEQ ID NO: 43 - protein, 742 aa, synthetic construct
MAADGYLPDWLEDNLSEGIREWWALKPGAPQPKANQQHQDNARGLVLPGYKYLGPGNGLDKGEPVNAADAAALEHDKAYDQQLKAGDNPYLKYNHADAEFQERLKEDTSFGGNLGRAVFQAKKRLLEPLGLVEEAAKTAPGKKRPVEQSPQEPDSSAGIGKSGAQPAKKRLNFGQTGDTESVPDPQPIGEPPAAPSGVGSLTMASGGGAPVADNNEGADGVGSSSGNWHCDSQWLGDRVITTSTRTWALPTYNNHLYKQISNSTSGGSSNDNAYFGYSTPWGYFDFNRFHCHFSPRDWQRLINNNWGFRPKRLNFKLFNIQVKEVTDNNGVKTIANNLTSTVQVFTDSDYQLPYVLGSAHEGCLPPFPADVFMIPQYGYLTLNDGSQAVGRSSFYCLEYFPSQMLRTGNNFQFSYEFENVPFHSSYAHSQSLDRLMNPLIDQYLYYLSKTMNGHDSPHSKAQNQQTLKFSVAGPSNMAVQGRNYIPGPSYRQQRVSTTVTQNNNSEFAWPGASSWALNGRNSLMNPGPAMASHKEGEDRFFPLSGSLIFGKQGTGRDNVDADKVMITNEEEIKTTNPVATESYGQVATNHQSAQAQAQTGWVQNQGILPGMVWQDRDVYLQGPIWAKIPHTDGNFHPSPLMGGFGMKHPPPQILIKNTPVPADPPTAFNKDKLNSFITQYSTGQVSVEIEWELQKENSKRWNPEIQYTSNYYKSNNVEFAVNTEGVYSEPRPIGTRYLTRNL

SEQ ID NO: 44 - protein, 742 aa, synthetic construct
MAADGYLPDWLEDNLSEGIREWWALKPGAPQPKANQQHQDNARGLVLPGYKYLGPGNGLDKGEPVNAADAAALEHDKAYDQQLKAGDNPYLKYNHADAEFQERLKEDTSFGGNLGRAVFQAKKRLLEPLGLVEEAAKTAPGKKRPVEQSPQEPDSSAGIGKSGAQPAKKRLNFGQTGDTESVPDPQPIGEPPAAPSGVGSLTMASGGGAPVADNNEGADGVGSSSGNWHCDSQWLGDRVITTSTRTWALPTYNNHLYKQISNSTSGGSSNDNAYFGYSTPWGYFDFNRFHCHFSPRDWQRLINNNWGFRPKRLNFKLFNIQVKEVTDNNGVKTIANNLTSTVQVFTDSDYQLPYVLGSAHEGCLPPFPADVFMIPQYGYLTLNDGSQAVGRSSFYCLEYFPSQMLRTGNNFQFSYEFENVPFHSSYAHSQSLDRLMNPLIDQYLYYLSKTIDGHDSPHSKAQNQQTLKFSVAGPSNMAVQGRNYIPGPSYRQQRVSTTVTQNNNSEFAWPGASSWALNGRNSLMNPGPAMASHKEGEDRFFPLSGSLIFGKQGTGRDNVDADKVMITNEEEIKTTNPVATESYGQVATNHQSAQAQAQTGWVQNQGILPGMVWQDRDVYLQGPIWAKIPHTDGNFHPSPLMGGFGMKHPPPQILIKNTPVPADPPTAFNKDKLNSFITQYSTGQVSVEIEWELQKENSKRWNPEIQYTSNYYKSNNVEFAVNTEGVYSEPRPIGTRYLTRNL

SEQ ID NO: 45 - protein, 742 aa, synthetic construct
MAADGYLPDWLEDNLSEGIREWWALKPGAPQPKANQQHQDNARGLVLPGYKYLGPGNGLDKGEPVNAADAAALEHDKAYDQQLKAGDNPYLKYNHADAEFQERLKEDTSFGGNLGRAVFQAKKRLLEPLGLVEEAAKTAPGKKRPVEQSPQEPDSSAGIGKSGAQPAKKRLNFGQTGDTESVPDPQPIGEPPAAPSGVGSLTMASGGGAPVADNNEGADGVGSSSGNWHCDSQWLGDRVITTSTRTWALPTYNNHLYKQISNSTSGGSSNDNAYFGYSTPWGYFDFNRFHCHFSPRDWQRLINNNWGFRPKRLNFKLFNIQVKEVTDNNGVKTIANNLTSTVQVFTDSDYQLPYVLGSAHEGCLPPFPADVFMIPQYGYLTLNDGSQAVGRSSFYCLEYFPSQMLRTGNNFQFSYEFENVPFHSSYAHSQSLDRLMNPLIDQYLYYLSKTNNGHDSPHSKAQNQQTLKFSVAGPSNMAVQGRNYIPGPSYRQQRVSTTVTQNNNSEFAWPGASSWALNGRNSLMNPGPAMASHKEGEDRFFPLSGSLIFGKQGTGRDNVDADKVMITNEEEIKTTNPVATESYGQVATNHQSAQAQAQTGWVQNQGILPGMVWQDRDVYLQGPIWAKIPHTDGNFHPSPLMGGFGMKHPPPQILIKNTPVPADPPTAFNKDKLNSFITQYSTGQVSVEIEWELQKENSKRWNPEIQYTSNYYKSNNVEFAVNTEGVYSEPRPIGTRYLTRNL

SEQ ID NO: 46 - protein, 742 aa, synthetic construct
MAADGYLPDWLEDNLSEGIREWWALKPGAPQPKANQQHQDNARGLVLPGYKYLGPGNGLDKGEPVNAADAAALEHDKAYDQQLKAGDNPYLKYNHADAEFQERLKEDTSFGGNLGRAVFQAKKRLLEPLGLVEEAAKTAPGKKRPVEQSPQEPDSSAGIGKSGAQPAKKRLNFGQTGDTESVPDPQPIGEPPAAPSGVGSLTMASGGGAPVADNNEGADGVGSSSGNWHCDSQWLGDRVITTSTRTWALPTYNNHLYKQISNSTSGGSSNDNAYFGYSTPWGYFDFNRFHCHFSPRDWQRLINNNWGFRPKRLNFKLFNIQVKEVTDNNGVKTIANNLTSTVQVFTDSDYQLPYVLGSAHEGCLPPFPADVFMIPQYGYLTLNDGSQAVGRSSFYCLEYFPSQMLRTGNNFQFSYEFENVPFHSSYAHSQSLDRLMNPLIDQYLYYLSKTQRKSGSPHSKAQNQQTLKFSVAGPSNMAVQGRNYIPGPSYRQQRVSTTVTQNNNSEFAWPGASSWALNGRNSLMNPGPAMASHKEGEDRFFPLSGSLIFGKQGTGRDNVDADKVMITNEEEIKTTNPVATESYGQVATNHQSAQAQAQTGWVQNQGILPGMVWQDRDVYLQGPIWAKIPHTDGNFHPSPLMGGFGMKHPPPQILIKNTPVPADPPTAFNKDKLNSFITQYSTGQVSVEIEWELQKENSKRWNPEIQYTSNYYKSNNVEFAVNTEGVYSEPRPIGTRYLTRNL

SEQ ID NO: 47 - protein, 742 aa, synthetic construct
MAADGYLPDWLEDNLSEGIREWWALKPGAPQPKANQQHQDNARGLVLPGYKYLGPGNGLDKGEPVNAADAAALEHDKAYDQQLKAGDNPYLKYNHADAEFQERLKEDTSFGGNLGRAVFQAKKRLLEPLGLVEEAAKTAPGKKRPVEQSPQEPDSSAGIGKSGAQPAKKRLNFGQTGDTESVPDPQPIGEPPAAPSGVGSLTMASGGGAPVADNNEGADGVGSSSGNWHCDSQWLGDRVITTSTRTWALPTYNNHLYKQISNSTSGGSSNDNAYFGYSTPWGYFDFNRFHCHFSPRDWQRLINNNWGFRPKRLNFKLFNIQVKEVTDNNGVKTIANNLTSTVQVFTDSDYQLPYVLGSAHEGCLPPFPADVFMIPQYGYLTLNDGSQAVGRSSFYCLEYFPSQMLRTGNNFQFSYEFENVPFHSSYAHSQSLDRLMNPLIDQYLYYLSKTINGSGSPHSKAQARKTLKFSVAGPSNMAVQGRNYIPGPSYRQQRVSTTVTQNNNSEFAWPGASSWALNGRNSLMNPGPAMASHKEGEDRFFPLSGSLIFGKQGTGRDNVDADKVMITNEEEIKTTNPVATESYGQVATNHQSAQAQAQTGWVQNQGILPGMVWQDRDVYLQGPIWAKIPHTDGNFHPSPLMGGFGMKHPPPQILIKNTPVPADPPTAFNKDKLNSFITQYSTGQVSVEIEWELQKENSKRWNPEIQYTSNYYKSNNVEFAVNTEGVYSEPRPIGTRYLTRNL

SEQ ID NO: 48 - protein, 742 aa, synthetic construct
MAADGYLPDWLEDNLSEGIREWWALKPGAPQPKANQQHQDNARGLVLPGYKYLGPGNGLDKGEPVNAADAAALEHDKAYDQQLKAGDNPYLKYNHADAEFQERLKEDTSFGGNLGRAVFQAKKRLLEPLGLVEEAAKTAPGKKRPVEQSPQEPDSSAGIGKSGAQPAKKRLNFGQTGDTESVPDPQPIGEPPAAPSGVGSLTMASGGGAPVADNNEGADGVGSSSGNWHCDSQWLGDRVITTSTRTWALPTYNNHLYKQISNSTSGGSSNDNAYFGYSTPWGYFDFNRFHCHFSPRDWQRLINNNWGFRPKRLNFKLFNIQVKEVTDNNGVKTIANNLTSTVQVFTDSDYQLPYVLGSAHEGCLPPFPADVFMIPQYGYLTLNDGSQAVGRSSFYCLEYFPSQMLRTGNNFQFSYEFENVPFHSSYAHSQSLDRLMNPLIDQYLYYLSKYIVGSGSPHSKAQNQQTLKFSVAGPSNMAVQGRNYIPGPSYRQQRVSTTVTQNNNSEFAWPGASSWALNGRNSLMNPGPAMASHKEGEDRFFPLSGSLIFGKQGTGRDNVDADKVMITNEEEIKTTNPVATESYGQVATNHQSAQAQAQTGWVQNQGILPGMVWQDRDVYLQGPIWAKIPHTDGNFHPSPLMGGFGMKHPPPQILIKNTPVPADPPTAFNKDKLNSFITQYSTGQVSVEIEWELQKENSKRWNPEIQYTSNYYKSNNVEFAVNTEGVYSEPRPIGTRYLTRNL

SEQ ID NO: 49 - protein, 742 aa, synthetic construct
MAADGYLPDWLEDNLSEGIREWWALKPGAPQPKANQQHQDNARGLVLPGYKYLGPGNGLDKGEPVNAADAAALEHDKAYDQQLKAGDNPYLKYNHADAEFQERLKEDTSFGGNLGRAVFQAKKRLLEPLGLVEEAAKTAPGKKRPVEQSPQEPDSSAGIGKSGAQPAKKRLNFGQTGDTESVPDPQPIGEPPAAPSGVGSLTMASGGGAPVADNNEGADGVGSSSGNWHCDSQWLGDRVITTSTRTWALPTYNNHLYKQISNSTSGGSSNDNAYFGYSTPWGYFDFNRFHCHFSPRDWQRLINNNWGFRPKRLNFKLFNIQVKEVTDNNGVKTIANNLTSTVQVFTDSDYQLPYVLGSAHEGCLPPFPADVFMIPQYGYLTLNDGSQAVGRSSFYCLEYFPSQMLRTGNNFQFSYEFENVPFHSSYAHSQSLDRLMNPLIDQYLYYLSKTISKRGSPHSKAQNQQTLKFSVAGPSNMAVQGRNYIPGPSYRQQRVSTTVTQNNNSEFAWPGASSWALNGRNSLMNPGPAMASHKEGEDRFFPLSGSLIFGKQGTGRDNVDADKVMITNEEEIKTTNPVATESYGQVATNHQSAQAQAQTGWVQNQGILPGMVWQDRDVYLQGPIWAKIPHTDGNFHPSPLMGGFGMKHPPPQILIKNTPVPADPPTAFNKDKLNSFITQYSTGQVSVEIEWELQKENSKRWNPEIQYTSNYYKSNNVEFAVNTEGVYSEPRPIGTRYLTRNL

SEQ ID NO: 50 - protein, 742 aa, synthetic construct
MAADGYLPDWLEDNLSEGIREWWALKPGAPQPKANQQHQDNARGLVLPGYKYLGPGNGLDKGEPVNAADAAALEHDKAYDQQLKAGDNPYLKYNHADAEFQERLKEDTSFGGNLGRAVFQAKKRLLEPLGLVEEAAKTAPGKKRPVEQSPQEPDSSAGIGKSGAQPAKKRLNFGQTGDTESVPDPQPIGEPPAAPSGVGSLTMASGGGAPVADNNEGADGVGSSSGNWHCDSQWLGDRVITTSTRTWALPTYNNHLYKQISNSTSGGSSNDNAYFGYSTPWGYFDFNRFHCHFSPRDWQRLINNNWGFRPKRLNFKLFNIQVKEVTDNNGVKTIANNLTSTVQVFTDSDYQLPYVLGSAHEGCLPPFPADVFMIPQYGYLTLNDGSQAVGRSSFYCLEYFPSQMLRTGNNFQFSYEFENVPFHSSYAHSQSLDRLMNPLIDQYLYYLSKGLGGSGSPHSKAQNQQTLKFSVAGPSNMAVQGRNYIPGPSYRQQRVSTTVTQNNNSEFAWPGASSWALNGRNSLMNPGPAMASHKEGEDRFFPLSGSLIFGKQGTGRDNVDADKVMITNEEEIKTTNPVATESYGQVATNHQSAQAQAQTGWVQNQGILPGMVWQDRDVYLQGPIWAKIPHTDGNFHPSPLMGGFGMKHPPPQILIKNTPVPADPPTAFNKDKLNSFITQYSTGQVSVEIEWELQKENSKRWNPEIQYTSNYYKSNNVEFAVNTEGVYSEPRPIGTRYLTRNL

SEQ ID NO: 51 - protein, 742 aa, synthetic construct
MAADGYLPDWLEDNLSEGIREWWALKPGAPQPKANQQHQDNARGLVLPGYKYLGPGNGLDKGEPVNAADAAALEHDKAYDQQLKAGDNPYLKYNHADAEFQERLKEDTSFGGNLGRAVFQAKKRLLEPLGLVEEAAKTAPGKKRPVEQSPQEPDSSAGIGKSGAQPAKKRLNFGQTGDTESVPDPQPIGEPPAAPSGVGSLTMASGGGAPVADNNEGADGVGSSSGNWHCDSQWLGDRVITTSTRTWALPTYNNHLYKQISNSTSGGSSNDNAYFGYSTPWGYFDFNRFHCHFSPRDWQRLINNNWGFRPKRLNFKLFNIQVKEVTDNNGVKTIANNLTSTVQVFTDSDYQLPYVLGSAHEGCLPPFPADVFMIPQYGYLTLNDGSQAVGRSSFYCLEYFPSQMLRTGNNFQFSYEFENVPFHSSYAHSQSLDRLMNPLIDQYLYYLSKTINGHDSPHSKAQNLQTLKFSVAGPSNMAVQGRNYIPGPSYRQQRVSTTVTQNNNSEFAWPGASSWALNGRNSLMNPGPAMASHKEGEDRFFPLSGSLIFGKQGTGRDNVDADKVMITNEEEIKTTNPVATESYGQVATNHQSAQAQAQTGWVQNQGILPGMVWQDRDVYLQGPIWAKIPHTDGNFHPSPLMGGFGMKHPPPQILIKNTPVPADPPTAFNKDKLNSFITQYSTGQVSVEIEWELQKENSKRWNPEIQYTSNYYKSNNVEFAVNTEGVYSEPRPIGTRYLTRNL

SEQ ID NO: 52 - protein, 742 aa, synthetic construct
MAADGYLPDWLEDNLSEGIREWWALKPGAPQPKANQQHQDNARGLVLPGYKYLGPGNGLDKGEPVNAADAAALEHDKAYDQQLKAGDNPYLKYNHADAEFQERLKEDTSFGGNLGRAVFQAKKRLLEPLGLVEEAAKTAPGKKRPVEQSPQEPDSSAGIGKSGAQPAKKRLNFGQTGDTESVPDPQPIGEPPAAPSGVGSLTMASGGGAPVADNNEGADGVGSSSGNWHCDSQWLGDRVITTSTRTWALPTYNNHLYKQISNSTSGGSSNDNAYFGYSTPWGYFDFNRFHCHFSPRDWQRLINNNWGFRPKRLNFKLFNIQVKEVTDNNGVKTIANNLTSTVQVFTDSDYQLPYVLGSAHEGCLPPFPADVFMIPQYGYLTLNDGSQAVGRSSFYCLEYFPSQMLRTGNNFQFSYEFENVPFHSSYAHSQSLDRLMNPLIDQYLYYLSKTVNGHDSPHSKAQNQQTLKFSVAGPSNMAVQGRNYIPGPSYRQQRVSTTVTQNNNSEFAWPGASSWALNGRNSLMNPGPAMASHKEGEDRFFPLSGSLIFGKQGTGRDNVDADKVMITNEEEIKTTNPVATESYGQVATNHQSAQAQAQTGWVQNQGILPGMVWQDRDVYLQGPIWAKIPHTDGNFHPSPLMGGFGMKHPPPQILIKNTPVPADPPTAFNKDKLNSFITQYSTGQVSVEIEWELQKENSKRWNPEIQYTSNYYKSNNVEFAVNTEGVYSEPRPIGTRYLTRNL

SEQ ID NO: 53 - protein, 742 aa, synthetic construct
MAADGYLPDWLEDNLSEGIREWWALKPGAPQPKANQQHQDNARGLVLPGYKYLGPGNGLDKGEPVNAADAAALEHDKAYDQQLKAGDNPYLKYNHADAEFQERLKEDTSFGGNLGRAVFQAKKRLLEPLGLVEEAAKTAPGKKRPVEQSPQEPDSSAGIGKSGAQPAKKRLNFGQTGDTESVPDPQPIGEPPAAPSGVGSLTMASGGGAPVADNNEGADGVGSSSGNWHCDSQWLGDRVITTSTRTWALPTYNNHLYKQISNSTSGGSSNDNAYFGYSTPWGYFDFNRFHCHFSPRDWQRLINNNWGFRPKRLNFKLFNIQVKEVTDNNGVKTIANNLTSTVQVFTDSDYQLPYVLGSAHEGCLPPFPADVFMIPQYGYLTLNDGSQAVGRSSFYCLEYFPSQMLRTGNNFQFSYEFENVPFHSSYAHSQSLDRLMNPLIDQYLYYLSKTINGHDSPHSKALNQQTLKFSVAGPSNMAVQGRNYIPGPSYRQQRVSTTVTQNNNSEFAWPGASSWALNGRNSLMNPGPAMASHKEGEDRFFPLSGSLIFGKQGTGRDNVDADKVMITNEEEIKTTNPVATESYGQVATNHQSAQAQAQTGWVQNQGILPGMVWQDRDVYLQGPIWAKIPHTDGNFHPSPLMGGFGMKHPPPQILIKNTPVPADPPTAFNKDKLNSFITQYSTGQVSVEIEWELQKENSKRWNPEIQYTSNYYKSNNVEFAVNTEGVYSEPRPIGTRYLTRNL

SEQ ID NO: 54 - protein, 742 aa, synthetic construct
MAADGYLPDWLEDNLSEGIREWWALKPGAPQPKANQQHQDNARGLVLPGYKYLGPGNGLDKGEPVNAADAAALEHDKAYDQQLKAGDNPYLKYNHADAEFQERLKEDTSFGGNLGRAVFQAKKRLLEPLGLVEEAAKTAPGKKRPVEQSPQEPDSSAGIGKSGAQPAKKRLNFGQTGDTESVPDPQPIGEPPAAPSGVGSLTMASGGGAPVADNNEGADGVGSSSGNWHCDSQWLGDRVITTSTRTWALPTYNNHLYKQISNSTSGGSSNDNAYFGYSTPWGYFDFNRFHCHFSPRDWQRLINNNWGFRPKRLNFKLFNIQVKEVTDNNGVKTIANNLTSTVQVFTDSDYQLPYVLGSAHEGCLPPFPADVFMIPQYGYLTLNDGSQAVGRSSFYCLEYFPSQMLRTGNNFQFSYEFENVPFHSSYAHSQSLDRLMNPLIDQYLYYLSKTINGHDSPHSKAQNQQSLKFSVAGPSNMAVQGRNYIPGPSYRQQRVSTTVTQNNNSEFAWPGASSWALNGRNSLMNPGPAMASHKEGEDRFFPLSGSLIFGKQGTGRDNVDADKVMITNEEEIKTTNPVATESYGQVATNHQSAQAQAQTGWVQNQGILPGMVWQDRDVYLQGPIWAKIPHTDGNFHPSPLMGGFGMKHPPPQILIKNTPVPADPPTAFNKDKLNSFITQYSTGQVSVEIEWELQKENSKRWNPEIQYTSNYYKSNNVEFAVNTEGVYSEPRPIGTRYLTRNL

SEQ ID NO: 55 - protein, 742 aa, synthetic construct
MAADGYLPDWLEDNLSEGIREWWALKPGAPQPKANQQHQDNARGLVLPGYKYLGPGNGLDKGEPVNAADAAALEHDKAYDQQLKAGDNPYLKYNHADAEFQERLKEDTSFGGNLGRAVFQAKKRLLEPLGLVEEAAKTAPGKKRPVEQSPQEPDSSAGIGKSGAQPAKKRLNFGQTGDTESVPDPQPIGEPPAAPSGVGSLTMASGGGAPVADNNEGADGVGSSSGNWHCDSQWLGDRVITTSTRTWALPTYNNHLYKQISNSTSGGSSNDNAYFGYSTPWGYFDFNRFHCHFSPRDWQRLINNNWGFRPKRLNFKLFNIQVKEVTDNNGVKTIANNLTSTVQVFTDSDYQLPYVLGSAHEGCLPPFPADVFMIPQYGYLTLNDGSQAVGRSSFYCLEYFPSQMLRTGNNFQFSYEFENVPFHSSYAHSQSLDRLMNPLIDQYLYYLSKTINGHDSPHSKAQNQQILKFSVAGPSNMAVQGRNYIPGPSYRQQRVSTTVTQNNNSEFAWPGASSWALNGRNSLMNPGPAMASHKEGEDRFFPLSGSLIFGKQGTGRDNVDADKVMITNEEEIKTTNPVATESYGQVATNHQSAQAQAQTGWVQNQGILPGMVWQDRDVYLQGPIWAKIPHTDGNFHPSPLMGGFGMKHPPPQILIKNTPVPADPPTAFNKDKLNSFITQYSTGQVSVEIEWELQKENSKRWNPEIQYTSNYYKSNNVEFAVNTEGVYSEPRPIGTRYLTRNL

SEQ ID NO: 56 - protein, 742 aa, synthetic construct
MAADGYLPDWLEDNLSEGIREWWALKPGAPQPKANQQHQDNARGLVLPGYKYLGPGNGLDKGEPVNAADAAALEHDKAYDQQLKAGDNPYLKYNHADAEFQERLKEDTSFGGNLGRAVFQAKKRLLEPLGLVEEAAKTAPGKKRPVEQSPQEPDSSAGIGKSGAQPAKKRLNFGQTGDTESVPDPQPIGEPPAAPSGVGSLTMASGGGAPVADNNEGADGVGSSSGNWHCDSQWLGDRVITTSTRTWALPTYNNHLYKQISNSTSGGSSNDNAYFGYSTPWGYFDFNRFHCHFSPRDWQRLINNNWGFRPKRLNFKLFNIQVKEVTDNNGVKTIANNLTSTVQVFTDSDYQLPYVLGSAHEGCLPPFPADVFMIPQYGYLTLNDGSQAVGRSSFYCLEYFPSQMLRTGNNFQFSYEFENVPFHSSYAHSQSLDRLMNPLIDQYLYYLSKTINGSGSPHFTRQNQQTLKFSVAGPSNMAVQGRNYIPGPSYRQQRVSTTVTQNNNSEFAWPGASSWALNGRNSLMNPGPAMASHKEGEDRFFPLSGSLIFGKQGTGRDNVDADKVMITNEEEIKTTNPVATESYGQVATNHQSAQAQAQTGWVQNQGILPGMVWQDRDVYLQGPIWAKIPHTDGNFHPSPLMGGFGMKHPPPQILIKNTPVPADPPTAFNKDKLNSFITQYSTGQVSVEIEWELQKENSKRWNPEIQYTSNYYKSNNVEFAVNTEGVYSEPRPIGTRYLTRNL

SEQ ID NO: 57 - protein, 742 aa, synthetic construct
MAADGYLPDWLEDNLSEGIREWWALKPGAPQPKANQQHQDNARGLVLPGYKYLGPGNGLDKGEPVNAADAAALEHDKAYDQQLKAGDNPYLKYNHADAEFQERLKEDTSFGGNLGRAVFQAKKRLLEPLGLVEEAAKTAPGKKRPVEQSPQEPDSSAGIGKSGAQPAKKRLNFGQTGDTESVPDPQPIGEPPAAPSGVGSLTMASGGGAPVADNNEGADGVGSSSGNWHCDSQWLGDRVITTSTRTWALPTYNNHLYKQISNSTSGGSSNDNAYFGYSTPWGYFDFNRFHCHFSPRDWQRLINNNWGFRPKRLNFKLFNIQVKEVTDNNGVKTIANNLTSTVQVFTDSDYQLPYVLGSAHEGCLPPFPADVFMIPQYGYLTLNDGSQAVGRSSFYCLEYFPSQMLRTGNNFQFSYEFENVPFHSSYAHSQSLDRLMNPLIDQYLYYLSKTSNGHDSPHSKAQNQQTLKFSVAGPSNMAVQGRNYIPGPSYRQQRVSTTVTQNNNSEFAWPGASSWALNGRNSLMNPGPAMASHKEGEDRFFPLSGSLIFGKQGTGRDNVDADKVMITNEEEIKTTNPVATESYGQVATNHQSAQAQAQTGWVQNQGILPGMVWQDRDVYLQGPIWAKIPHTDGNFHPSPLMGGFGMKHPPPQILIKNTPVPADPPTAFNKDKLNSFITQYSTGQVSVEIEWELQKENSKRWNPEIQYTSNYYKSNNVEFAVNTEGVYSEPRPIGTRYLTRNL

SEQ ID NO: 58 - protein, 742 aa, synthetic construct
MAADGYLPDWLEDNLSEGIREWWALKPGAPQPKANQQHQDNARGLVLPGYKYLGPGNGLDKGEPVNAADAAALEHDKAYDQQLKAGDNPYLKYNHADAEFQERLKEDTSFGGNLGRAVFQAKKRLLEPLGLVEEAAKTAPGKKRPVEQSPQEPDSSAGIGKSGAQPAKKRLNFGQTGDTESVPDPQPIGEPPAAPSGVGSLTMASGGGAPVADNNEGADGVGSSSGNWHCDSQWLGDRVITTSTRTWALPTYNNHLYKQISNSTSGGSSNDNAYFGYSTPWGYFDFNRFHCHFSPRDWQRLINNNWGFRPKRLNFKLFNIQVKEVTDNNGVKTIANNLTSTVQVFTDSDYQLPYVLGSAHEGCLPPFPADVFMIPQYGYLTLNDGSQAVGRSSFYCLEYFPSQMLRTGNNFQFSYEFENVPFHSSYAHSQSLDRLMNPLIDQYLYYLSKTINGSGSPHSLPWNQQTLKFSVAGPSNMAVQGRNYIPGPSYRQQRVSTTVTQNNNSEFAWPGASSWALNGRNSLMNPGPAMASHKEGEDRFFPLSGSLIFGKQGTGRDNVDADKVMITNEEEIKTTNPVATESYGQVATNHQSAQAQAQTGWVQNQGILPGMVWQDRDVYLQGPIWAKIPHTDGNFHPSPLMGGFGMKHPPPQILIKNTPVPADPPTAFNKDKLNSFITQYSTGQVSVEIEWELQKENSKRWNPEIQYTSNYYKSNNVEFAVNTEGVYSEPRPIGTRYLTRNL

SEQ ID NO: 59 - protein, 742 aa, synthetic construct
MAADGYLPDWLEDNLSEGIREWWALKPGAPQPKANQQHQDNARGLVLPGYKYLGPGNGLDKGEPVNAADAAALEHDKAYDQQLKAGDNPYLKYNHADAEFQERLKEDTSFGGNLGRAVFQAKKRLLEPLGLVEEAAKTAPGKKRPVEQSPQEPDSSAGIGKSGAQPAKKRLNFGQTGDTESVPDPQPIGEPPAAPSGVGSLTMASGGGAPVADNNEGADGVGSSSGNWHCDSQWLGDRVITTSTRTWALPTYNNHLYKQISNSTSGGSSNDNAYFGYSTPWGYFDFNRFHCHFSPRDWQRLINNNWGFRPKRLNFKLFNIQVKEVTDNNGVKTIANNLTSTVQVFTDSDYQLPYVLGSAHEGCLPPFPADVFMIPQYGYLTLNDGSQAVGRSSFYCLEYFPSQMLRTGNNFQFSYEFENVPFHSSYAHSQSLDRLMNPLIDQYLYYLSKTINGHDSPHSKAQNHQTLKFSVAGPSNMAVQGRNYIPGPSYRQQRVSTTVTQNNNSEFAWPGASSWALNGRNSLMNPGPAMASHKEGEDRFFPLSGSLIFGKQGTGRDNVDADKVMITNEEEIKTTNPVATESYGQVATNHQSAQAQAQTGWVQNQGILPGMVWQDRDVYLQGPIWAKIPHTDGNFHPSPLMGGFGMKHPPPQILIKNTPVPADPPTAFNKDKLNSFITQYSTGQVSVEIEWELQKENSKRWNPEIQYTSNYYKSNNVEFAVNTEGVYSEPRPIGTRYLTRNL

SEQ ID NO: 60 - protein, 11 aa, synthetic construct
ENVSGSPHSKA

SEQ ID NO: 61-136 - skipped (76 entries)

SEQ ID NO: 137 - DNA, 2211 bp, synthetic construct
  source 1..2211: mol_type = other DNA
atggctgccgatggttatcttccagattggctcgaggacaaccttagtgaaggaattcgcgagtggtgggctttgaaacctggagcccctcaacccaaggcaaatcaacaacatcaagacaacgctcgaggtcttgtgcttccgggttacaaataccttggacccggcaacggactcgacaagggggagccggtcaacgcagcagacgcggcggccctcgagcacgacaaggcctacgaccagcagctcaaggccggagacaacccgtacctcaagtacaaccacgccgacgccgagttccaggagcggctcaaagaagatacgtcttttgggggcaacctcgggcgagcagtcttccaggccaaaaagaggcttcttgaacctcttggtctggttgaggaagcggctaagacggctcctggaaagaagaggcctgtagagcagtctcctcaggaaccggactcctccgcgggtattggcaaatcgggtgcacagcccgctaaaaagagactcaatttcggtcagactggcgacacagagtcagtcccagaccctcaaccaatcggagaacctcccgcagccccctcaggtgtgggatctcttacaatggcttcaggtggtggcgcaccagtggcagacaataacgaaggtgccgatggagtgggtagttcctcgggaaattggcattgcgattcccaatggctgggggacagagtcatcaccaccagcacccgaacctgggccctgcccacctacaacaatcacctctacaagcaaatctccaacagcacatctggaggatcttcaaatgacaacgcctacttcggctacagcaccccctgggggtattttgacttcaacagattccactgccacttctcaccacgtgactggcagcgactcatcaacaacaactggggattccggcctaagcgactcaacttcaagctcttcaacattcaggtcaaagaggttacggacaacaatggagtcaagaccatcgccaataaccttaccagcacggtccaggtcttcacggactcagactatcagctcccgtacgtgctcgggtcggctcacgagggctgcctcccgccgttcccagcggacgttttcatgattcctcagtacgggtatctgacgcttaatgatggaagccaggccgtgggtcgttcgtccttttactgcctggaatatttcccgtcgcaaatgctaagaacgggtaacaacttccagttcagctacgagtttgagaacgtacctttccatagcagctacgctcacagccaaagcctggaccgactaatgaatccactcatcgaccaatacttgtactatctctcaaagactattaacggttctggacagaatcaacaaacgctaaaattcagtgtggccggacccagcaacatggctgtccagggaagaaactacatacctggacccagctaccgacaacaacgtgtctcaaccactgtgactcaaaacaacaacagcgaatttgcttggcctggagcttcttcttgggctctcaatggacgtaatagcttgatgaatcctggacctgctatggccagccacaaagaaggagaggaccgtttctttcctttgtctggatctttaatttttggcaaacaaggaactggaagagacaacgtggatgcggacaaagtcatgataaccaacgaagaagaaattaaaactactaacccggtagcaacggagtcctatggacaagtggccacaaaccaccagagtgcccaagcacaggcgcagaccggctgggttcaaaaccaaggaatacttccgggtatggtttggcaggacagagatgtgtacctgcaaggacccatttgggccaaaattcctcacacggacggcaactttcacccttctccgctgatgggagggtttggaatgaagcacccgcctcctcagatcctcatcaaaaacacacctgtacctgcggatcctccaacggccttcaacaaggacaagctgaactctttcatcacccagtattctactggccaagtcagcgtggagatcgagtgggagctgcagaaggaaaacagcaagcgctggaacccggagatccagtacacttccaactattacaagtctaataatgttgaatttgctgttaatactgaaggtgtatatagtgaaccccgccccattggcaccagatacctgactcgtaatctgtaa

SEQ ID NO: 138 - protein, 736 aa, synthetic construct
MAADGYLPDWLEDNLSEGIREWWALKPGAPQPKANQQHQDNARGLVLPGYKYLGPGNGLDKGEPVNAADAAALEHDKAYDQQLKAGDNPYLKYNHADAEFQERLKEDTSFGGNLGRAVFQAKKRLLEPLGLVEEAAKTAPGKKRPVEQSPQEPDSSAGIGKSGAQPAKKRLNFGQTGDTESVPDPQPIGEPPAAPSGVGSLTMASGGGAPVADNNEGADGVGSSSGNWHCDSQWLGDRVITTSTRTWALPTYNNHLYKQISNSTSGGSSNDNAYFGYSTPWGYFDFNRFHCHFSPRDWQRLINNNWGFRPKRLNFKLFNIQVKEVTDNNGVKTIANNLTSTVQVFTDSDYQLPYVLGSAHEGCLPPFPADVFMIPQYGYLTLNDGSQAVGRSSFYCLEYFPSQMLRTGNNFQFSYEFENVPFHSSYAHSQSLDRLMNPLIDQYLYYLSKTINGSGQNQQTLKFSVAGPSNMAVQGRNYIPGPSYRQQRVSTTVTQNNNSEFAWPGASSWALNGRNSLMNPGPAMASHKEGEDRFFPLSGSLIFGKQGTGRDNVDADKVMITNEEEIKTTNPVATESYGQVATNHQSAQAQAQTGWVQNQGILPGMVWQDRDVYLQGPIWAKIPHTDGNFHPSPLMGGFGMKHPPPQILIKNTPVPADPPTAFNKDKLNSFITQYSTGQVSVEIEWELQKENSKRWNPEIQYTSNYYKSNNVEFAVNTEGVYSEPRPIGTRYLTRNL

SEQ ID NO: 139-199 - skipped (61 entries)

SEQ ID NO: 200 - protein, 14 aa, synthetic construct
GSGSPHSKAQNQQT

SEQ ID NO: 201 - protein, 14 aa, synthetic construct
GHDSPHKSGQNQQT

SEQ ID NO: 202 - protein, 14 aa, synthetic construct
GSGSPHARMQNQQT

SEQ ID NO: 203 - protein, 14 aa, synthetic construct
GSGSPHVKSQNQQT

SEQ ID NO: 204 - protein, 14 aa, synthetic construct
GQDSPHKSGQNQQT

SEQ ID NO: 205 - protein, 14 aa, synthetic construct
GSGSPHASRQNQQT

SEQ ID NO: 206 - protein, 14 aa, synthetic construct
GSGSPHASRQNKQT

SEQ ID NO: 207 - protein, 14 aa, synthetic construct
GSGSPHVKIQNQQT

SEQ ID NO: 208 - protein, 14 aa, synthetic construct
GSGSPHSKAKNQQT

SEQ ID NO: 209 - protein, 14 aa, synthetic construct
GSGSPHKKNQNQQT

SEQ ID NO: 210 - protein, 14 aa, synthetic construct
GSGSPHVRMQNQQT

SEQ ID NO: 211 - protein, 14 aa, synthetic construct
GSGSPHASRQKQQT

SEQ ID NO: 212 - protein, 14 aa, synthetic construct
GHSSPHRSGQNQQT

SEQ ID NO: 213 - protein, 14 aa, synthetic construct
GMRTYHLSGQNQQT

SEQ ID NO: 214 - protein, 14 aa, synthetic construct
GSGSPHTRGQNQQT

SEQ ID NO: 215 - protein, 14 aa, synthetic construct
GSGIIPVSSQNQQT

SEQ ID NO: 216 - protein, 14 aa, synthetic construct
GSEYGHKSGQNQQT

SEQ ID NO: 217 - protein, 14 aa, synthetic construct
GRGQNVSSVHRQQT

SEQ ID NO: 218 - protein, 14 aa, synthetic construct
GSSHRFYGGQNQQT

SEQ ID NO: 219 - protein, 14 aa, synthetic construct
GYFVAAWSGQNQQT

SEQ ID NO: 220 - protein, 14 aa, synthetic construct
GSVLHSHAAQNQQT

SEQ ID NO: 221 - protein, 14 aa, synthetic construct
GSGDLVVSTQNQQT

SEQ ID NO: 222 - protein, 14 aa, synthetic construct
GSYGMAASGQNQQT

SEQ ID NO: 223 - protein, 14 aa, synthetic construct
GLNHFGASGQNQQT

SEQ ID NO: 224 - protein, 14 aa, synthetic construct
GSTGSHSAGQNQHT

SEQ ID NO: 225 - protein, 14 aa, synthetic construct
GLAGHTVSGQNQQT

SEQ ID NO: 226 - protein, 14 aa, synthetic construct
GIILGASSGQNQQT

SEQ ID NO: 227 - protein, 14 aa, synthetic construct
GSGVSTYNIQNQQT

SEQ ID NO: 228 - protein, 14 aa, synthetic construct
GSLVSVQTGQNQQT

SEQ ID NO: 229 - protein, 14 aa, synthetic construct
GQSSPHRSGQNQQT

SEQ ID NO: 230 - protein, 14 aa, synthetic construct
GREYGHKSGQNQQT

SEQ ID NO: 231 - protein, 14 aa, synthetic construct
GHTLTLSSGQNQQT

SEQ ID NO: 232 - protein, 14 aa, synthetic construct
GSITLIPSGQNQQT

SEQ ID NO: 233 - protein, 14 aa, synthetic construct
GSNGFTALGQNQQT

SEQ ID NO: 234 - protein, 14 aa, synthetic construct
GSGHSSHSVQNQQT

SEQ ID NO: 235 - protein, 14 aa, synthetic construct
GSGIPQRSGKNQQT

SEQ ID NO: 236 - protein, 14 aa, synthetic construct
GSGDTLHMLQNQQT

SEQ ID NO: 237 - protein, 14 aa, synthetic construct
GERHTVLSGQNQQT

SEQ ID NO: 238 - protein, 14 aa, synthetic construct
GSGMPQSHIQNQQT

SEQ ID NO: 239 - protein, 14 aa, synthetic construct
GSGQLSGIGGNQQT

SEQ ID NO: 240 - protein, 14 aa, synthetic construct
GSGQNRKPASFAQT

SEQ ID NO: 241 - protein, 14 aa, synthetic construct
GSGSVSQLGQNQQT

SEQ ID NO: 242 - protein, 14 aa, synthetic construct
GSDFLGTHGQNQQT

SEQ ID NO: 243 - protein, 14 aa, synthetic construct
GQIVQNPSGQNQQT

SEQ ID NO: 244 - protein, 14 aa, synthetic construct
GSGTQIPSQQNQQT

SEQ ID NO: 245 - protein, 14 aa, synthetic construct
GSGQNQQSAREGLT

SEQ ID NO: 246 - protein, 14 aa, synthetic construct
GSGLGMSTGQNQQT

SEQ ID NO: 247 - protein, 14 aa, synthetic construct
GSGLPVLSGQNQQT

SEQ ID NO: 248 - protein, 14 aa, synthetic construct
GSGHSIRTDQNQQT

SEQ ID NO: 249 - protein, 14 aa, synthetic construct
GSGQSVQTVVNQQT

SEQ ID NO: 250 - protein, 14 aa, synthetic construct
GSGQNRAQSRFQQT

SEQ ID NO: 251 - protein, 14 aa, synthetic construct
GGGDLGRSSQNQQT

SEQ ID NO: 252 - protein, 14 aa, synthetic construct
GGGTKMDSGQNQQT

SEQ ID NO: 253 - protein, 14 aa, synthetic construct
GSGSPHPSRQNQQT

SEQ ID NO: 254 - protein, 14 aa, synthetic construct
GSGQFTNAGMNQQT

SEQ ID NO: 255 - protein, 14 aa, synthetic construct
GGRNGHTVGQNQQT

SEQ ID NO: 256 - protein, 14 aa, synthetic construct
GSGFGPQTGQNQQT

SEQ ID NO: 257 - protein, 14 aa, synthetic construct
GRTDSHTSGQNQQT

SEQ ID NO: 258 - protein, 14 aa, synthetic construct
GYEVLGSSGQNQQT

SEQ ID NO: 259 - protein, 14 aa, synthetic construct
GSVHLSVTGQNQQT

SEQ ID NO: 260 - protein, 14 aa, synthetic construct
GFMSYKGSGQNQQT

SEQ ID NO: 261 - protein, 14 aa, synthetic construct
GNIAGSVSGQNQQT

SEQ ID NO: 262 - protein, 14 aa, synthetic construct
GSGSHRDVSQNQQT

SEQ ID NO: 263 - protein, 14 aa, synthetic construct
GGLGSMSSGQNQQT

SEQ ID NO: 264 - protein, 14 aa, synthetic construct
GSGHLPQSAQNQQT

SEQ ID NO: 265 - protein, 14 aa, synthetic construct
GGVLVGGSGQNQQT

SEQ ID NO: 266 - protein, 14 aa, synthetic construct
GTHPYTSSGQNQQT

SEQ ID NO: 267 - protein, 14 aa, synthetic construct
GSGQNQQLKENRST

SEQ ID NO: 268 - protein, 14 aa, synthetic construct
GSGQNQQTSPHNHT

SEQ ID NO: 269 - protein, 14 aa, synthetic construct
GSGTLYPQSQNQQT

SEQ ID NO: 270 - protein, 14 aa, synthetic construct
GSGQNQQSNWITKT

SEQ ID NO: 271 - protein, 14 aa, synthetic construct
GSGYTSLFLQNQQT

SEQ ID NO: 272 - protein, 14 aa, synthetic construct
GSGVMTHVLQNQQT

SEQ ID NO: 273 - protein, 14 aa, synthetic construct
GSVSDVRAGQNQQT

SEQ ID NO: 274 - protein, 14 aa, synthetic construct
GSGQSHMATLNQQT

SEQ ID NO: 275 - protein, 14 aa, synthetic construct
GSGLSVHLAQNQQT

SEQ ID NO: 276 - protein, 14 aa, synthetic construct
GSGLSHATQQNQQT

SEQ ID NO: 277 - protein, 14 aa, synthetic construct
GSGLSVQSGQNQQT

SEQ ID NO: 278 - protein, 14 aa, synthetic construct
GSGHMTYREKNQQT

SEQ ID NO: 279 - protein, 14 aa, synthetic construct
GSKGVPTPGQNQQT

SEQ ID NO: 280 - protein, 14 aa, synthetic construct
GSGLLPLSSQNQQT

SEQ ID NO: 281 - protein, 14 aa, synthetic construct
GNGLYAVSGQNQQT

SEQ ID NO: 282 - protein, 14 aa, synthetic construct
GFNGSPSSGQNQQT

SEQ ID NO: 283 - protein, 14 aa, synthetic construct
GSGQIRHSDQNQQT

SEQ ID NO: 284 - protein, 14 aa, synthetic construct
GGQVAPSSGQNQQT

SEQ ID NO: 285 - protein, 14 aa, synthetic construct
GSFSMHTHGQNQQT

SEQ ID NO: 286 - protein, 14 aa, synthetic construct
GSGQNQQVIQGSNT

SEQ ID NO: 287 - protein, 14 aa, synthetic construct
GRVLHSHAGQNQQT

SEQ ID NO: 288 - protein, 14 aa, synthetic construct
GSGQNQQTSLQDQT

SEQ ID NO: 289 - protein, 14 aa, synthetic construct
GSGLGRAPVQNQQT

SEQ ID NO: 290 - protein, 14 aa, synthetic construct
GNGFSSASGQNQQT

SEQ ID NO: 291 - protein, 14 aa, synthetic construct
GSGQMASRESNQQT

SEQ ID NO: 292 - protein, 14 aa, synthetic construct
GPGLPNHSGQNQQT

SEQ ID NO: 293 - protein, 14 aa, synthetic construct
GNIQWQGSGQNQQT

SEQ ID NO: 294 - protein, 14 aa, synthetic construct
GMSAHMSSGQNQQT

SEQ ID NO: 295 - protein, 14 aa, synthetic construct
GHSFVNRSGQNQQT

SEQ ID NO: 296 - protein, 14 aa, synthetic construct
GRAVMDHSGQNQQT

SEQ ID NO: 297 - protein, 14 aa, synthetic construct
GALTVMQSGQNQQT

SEQ ID NO: 298 - protein, 14 aa, synthetic construct
GSGQRSPVLPNQQT

SEQ ID NO: 299 - protein, 14 aa, synthetic construct
GSGQNGHLSLKQQT

SEQ ID NO: 300 - protein, 14 aa, synthetic construct
GSLPRGTSDQNQQT

SEQ ID NO: 301 - protein, 14 aa, synthetic construct
GVAGSLVSGQNQQT

SEQ ID NO: 302 - protein, 14 aa, synthetic construct
GRGGIPQSGQNQQT

SEQ ID NO: 303 - protein, 14 aa, synthetic construct
GSGQYASSIPNQQT

SEQ ID NO: 304 - protein, 14 aa, synthetic construct
GTDFGRQSSQNQQT

SEQ ID NO: 305 - protein, 14 aa, synthetic construct
GIFMQTPSGQNQQT

SEQ ID NO: 306 - protein, 14 aa, synthetic construct
GSGQNQQTRLVDLT

SEQ ID NO: 307 - protein, 14 aa, synthetic construct
GTREMPLSGQNQQT

SEQ ID NO: 308 - protein, 14 aa, synthetic construct
GSRLVHVHGQNQQT

SEQ ID NO: 309 - protein, 14 aa, synthetic construct
GSGRLVPNGPNQQT

SEQ ID NO: 310 - protein, 14 aa, synthetic construct
GSGYLRESPQNQQT

SEQ ID NO: 311 - protein, 14 aa, synthetic construct
GARIQNASGQKQQT

SEQ ID NO: 312 - protein, 14 aa, synthetic construct
GLSNPMPSGQNQQT

SEQ ID NO: 313 - protein, 14 aa, synthetic construct
GSTVQDTRGQNQQT

SEQ ID NO: 314 - protein, 14 aa, synthetic construct
GPFGMPSSGQNQQT

SEQ ID NO: 315 - protein, 14 aa, synthetic construct
GSGQNHGVLSNQQT

SEQ ID NO: 316 - protein, 14 aa, synthetic construct
GSGYSMSQAQNQQT

SEQ ID NO: 317 - protein, 14 aa, synthetic construct
GSGMLTHTLQNQQT

SEQ ID NO: 318 - protein, 14 aa, synthetic construct
GRGSPHASRQNQQT

SEQ ID NO: 319 - protein, 14 aa, synthetic construct
GLSWPSTSGQNQQT

SEQ ID NO: 320 - protein, 14 aa, synthetic construct
GNSMERTSGQNQQT

SEQ ID NO: 321 - protein, 14 aa, synthetic construct
GSGMSPSTLQNQQT

SEQ ID NO: 322 - protein, 14 aa, synthetic construct
GSGHGQVLSQNQQT

SEQ ID NO: 323 - protein, 14 aa, synthetic construct
GRGQIYSTGGNQQT

SEQ ID NO: 324 - protein, 14 aa, synthetic construct
GVVAAHNSGQNQQT

SEQ ID NO: 325 - protein, 14 aa, synthetic construct
GDSSLRHSGQNQQT

SEQ ID NO: 326 - protein, 14 aa, synthetic construct
GSLVSQGAGQNQQT

SEQ ID NO: 327 - protein, 14 aa, synthetic construct
GSLLQAHSGQNQQT

SEQ ID NO: 328 - protein, 14 aa, synthetic construct
GSGHIYVGIQNQQT

SEQ ID NO: 329 - protein, 14 aa, synthetic construct
GHHTTVQSGQNQQT

SEQ ID NO: 330 - protein, 14 aa, synthetic construct
GSRQSKRNELNQQT

SEQ ID NO: 331 - protein, 14 aa, synthetic construct
GSGQNQQHVSSPRT

SEQ ID NO: 332 - protein, 14 aa, synthetic construct
GSSKELLWGQNQQT

SEQ ID NO: 333 - protein, 14 aa, synthetic construct
GSLSTPSSGQNQQT

SEQ ID NO: 334 - protein, 14 aa, synthetic construct
GSIGYAGQGQNQQT

SEQ ID NO: 335 - protein, 14 aa, synthetic construct
GSGQNQRVSNSQQT

SEQ ID NO: 336 - protein, 14 aa, synthetic construct
GSGYASHVQQNQQT

SEQ ID NO: 337 - protein, 14 aa, synthetic construct
GSGEYSRSGQNQQT

SEQ ID NO: 338 - protein, 14 aa, synthetic construct
GSVSTHSSGQNQQT

SEQ ID NO: 339 - protein, 14 aa, synthetic construct
GSGQNQHSLGNYQT

SEQ ID NO: 340 - protein, 14 aa, synthetic construct
GSGGLDTRGQNQQT

SEQ ID NO: 341 - protein, 14 aa, synthetic construct
GNILHATSGQNQQT

SEQ ID NO: 342 - protein, 14 aa, synthetic construct
GSGQSYTMTQNQQT

SEQ ID NO: 343 - protein, 14 aa, synthetic construct
GSGQNQHSAPNSQT

SEQ ID NO: 344 - protein, 14 aa, synthetic construct
GSGQNQQTMDHNRT

SEQ ID NO: 345 - protein, 14 aa, synthetic construct
GSNGGVGTGQNQQT

SEQ ID NO: 346 - protein, 14 aa, synthetic construct
GAGSIIPSGQNQQT

SEQ ID NO: 347 - protein, 14 aa, synthetic construct
GSGQTHGGQHNQQT

SEQ ID NO: 348 - protein, 14 aa, synthetic construct
GSNLSFQSGQNQQT

SEQ ID NO: 349 - protein, 14 aa, synthetic construct
GATLQVHSGQNQQT

SEQ ID NO: 350 - protein, 14 aa, synthetic construct
GSGFNQRSEQNQQT

SEQ ID NO: 351 - protein, 14 aa, synthetic construct
GSGSLRDFDQNQQT

SEQ ID NO: 352 - protein, 14 aa, synthetic construct
GSGDSITGKQNQQT

SEQ ID NO: 353 - protein, 14 aa, synthetic construct
GSGQDRNIVQNQQT

SEQ ID NO: 354 - protein, 14 aa, synthetic construct
GSGLSHSHQQNQQT

SEQ ID NO: 355 - protein, 14 aa, synthetic construct
GSGQNQQTGMSSVK

SEQ ID NO: 356 - protein, 14 aa, synthetic construct
GSVTHGISGQNQQT

SEQ ID NO: 357 - protein, 14 aa, synthetic construct
GVVAHQPSGQNQQT

SEQ ID NO: 358 - protein, 14 aa, synthetic construct
GSGPILGQLQNQQT

SEQ ID NO: 359 - protein, 14 aa, synthetic construct
GSGHVPNSGLNQQT

SEQ ID NO: 360 - protein, 14 aa, synthetic construct
GDAGVRSSGQNQQT

SEQ ID NO: 361 - protein, 14 aa, synthetic construct
GSGSQLMSLQNQQT

SEQ ID NO: 362 - protein, 14 aa, synthetic construct
GSGLDYSQRQNQQT

SEQ ID NO: 363 - protein, 14 aa, synthetic construct
GSGQSSGRLINKQT

SEQ ID NO: 364 - protein, 14 aa, synthetic construct
GSSVSPSSGQNQQT

SEQ ID NO: 365 - protein, 14 aa, synthetic construct
GSGQVVGLSGNQQT

SEQ ID NO: 366 - protein, 14 aa, synthetic construct
GSNMGVPLGQNQQT

SEQ ID NO: 367 - protein, 14 aa, synthetic construct
GSFYPSSTGQNQQT

SEQ ID NO: 368 - protein, 14 aa, synthetic construct
GSGQNQQTRLTDLT

SEQ ID NO: 369 - protein, 14 aa, synthetic construct
GPTNGRSSGQNQQT

SEQ ID NO: 370 - protein, 14 aa, synthetic construct
GSGLLHGKLQNQQT

SEQ ID NO: 371 - protein, 14 aa, synthetic construct
GANMGHVSGQNQQT

SEQ ID NO: 372 - protein, 14 aa, synthetic construct
GSGQNQQSGRGDLT

SEQ ID NO: 373 - protein, 14 aa, synthetic construct
GSHGHYASGQKQQT

SEQ ID NO: 374 - protein, 14 aa, synthetic construct
GSGDLRISPQNQQT

SEQ ID NO: 375 - protein, 14 aa, synthetic construct
GSGMPVILGQNQQT

SEQ ID NO: 376 - protein, 14 aa, synthetic construct
GRGVITSSGQNHQT

SEQ ID NO: 377 - protein, 14 aa, synthetic construct
GSGHSVSGPQNQQT

SEQ ID NO: 378 - protein, 14 aa, synthetic construct
GSRNGHTVGRNQQT

SEQ ID NO: 379 - protein, 14 aa, synthetic construct
GAGVHMVSGQNQQT

SEQ ID NO: 380 - protein, 14 aa, synthetic construct
GSGQNHRPSVLQQT

SEQ ID NO: 381 - protein, 14 aa, synthetic construct
GSGSPRDSIQNQQT

SEQ ID NO: 382 - protein, 14 aa, synthetic construct
GSGQGIHSSVNQQT

SEQ ID NO: 383 - protein, 14 aa, synthetic construct
GSGQQLSITPNQQT

SEQ ID NO: 384 - protein, 14 aa, synthetic construct
GGYHSQTSGQNQQT

SEQ ID NO: 385 - protein, 14 aa, synthetic construct
GSLHHDNHGQNQQT

SEQ ID NO: 386 - protein, 14 aa, synthetic construct
GIMARDSSGQNQQT

SEQ ID NO: 387 - protein, 14 aa, synthetic construct
GVVHITNSGQNQQT

SEQ ID NO: 388 - protein, 14 aa, synthetic construct
GSGQNQHSAPFNQT

SEQ ID NO: 389 - protein, 14 aa, synthetic construct
GSGQTSGLKQNQQT

SEQ ID NO: 390 - protein, 14 aa, synthetic construct
GSGQNQQTSLSNTA

SEQ ID NO: 391 - protein, 14 aa, synthetic construct
GSGQNQAVHNKSQT

SEQ ID NO: 392 - protein, 14 aa, synthetic construct
GVHTHLPSGQNQQT

SEQ ID NO: 393 - protein, 14 aa, synthetic construct
GHLTMHNSGQNHQT

SEQ ID NO: 394 - protein, 14 aa, synthetic construct
GSGSSSRPYQNQQT

SEQ ID NO: 395 - protein, 14 aa, synthetic construct
GILLATPSGQNQQT

SEQ ID NO: 396 - protein, 14 aa, synthetic construct
GSGQNAGSFPNQQT

SEQ ID NO: 397 - protein, 14 aa, synthetic construct
GSRDGHTVGQNQQT

SEQ ID NO: 398 - protein, 14 aa, synthetic construct
GSLLISTSGQNQQT

SEQ ID NO: 399 - protein, 14 aa, synthetic construct
GSGAMPSHGQNQQT

SEQ ID NO: 400 - protein, 14 aa, synthetic construct
GALVSPISGQNQQT

SEQ ID NO: 401 - protein, 14 aa, synthetic construct
GSLSSHGVGQNQQT

SEQ ID NO: 402 - protein, 14 aa, synthetic construct
GSGQNQQASLAMRT

SEQ ID NO: 403 - protein, 14 aa, synthetic construct
GPGLGSHSGQNQQT

SEQ ID NO: 404 - protein, 14 aa, synthetic construct
GHDSQHKSGQNQQT

SEQ ID NO: 405 - protein, 14 aa, synthetic construct
GSGLTLSATQNQQT

SEQ ID NO: 406 - protein, 14 aa, synthetic construct
GSGQVVAHVGNQQT

SEQ ID NO: 407 - protein, 14 aa, synthetic construct
GSGLRTMTTQNQQT

SEQ ID NO: 408 - protein, 14 aa, synthetic construct
GSGQVGRLLQNQQT

SEQ ID NO: 409 - protein, 14 aa, synthetic construct
GSGQLSHQSVNQQT

SEQ ID NO: 410 - protein, 14 aa, synthetic construct
GSGDRYQTLQNQQT

SEQ ID NO: 411 - protein, 14 aa, synthetic construct
GSGQNQQLKSSAQT

SEQ ID NO: 412 - protein, 14 aa, synthetic construct
GSGQNQYSIPVAQT

SEQ ID NO: 413 - protein, 14 aa, synthetic construct
GSGERLHLTQNQQT

SEQ ID NO: 414 - protein, 14 aa, synthetic construct
GSGHNQQVRTAPNT

SEQ ID NO: 415 - protein, 14 aa, synthetic construct
GGLSHVMSGQNQQT

SEQ ID NO: 416 - protein, 14 aa, synthetic construct
GSGQSHRDVLNQQT

SEQ ID NO: 417 - protein, 14 aa, synthetic construct
GSGQNLAGRMDQQT

SEQ ID NO: 418 - protein, 14 aa, synthetic construct
GSGQNQQTNRGNPM

SEQ ID NO: 419 - protein, 14 aa, synthetic construct
GSGQSYQRDHNQQT

SEQ ID NO: 420 - protein, 14 aa, synthetic construct
GSLLSAGMGQNQHT

SEQ ID NO: 421 - protein, 14 aa, synthetic construct
GSGQNQQTAIYRNI

SEQ ID NO: 422 - protein, 14 aa, synthetic construct
GSGQNQQTSGTTNC

SEQ ID NO: 423 - protein, 14 aa, synthetic construct
GMTSHSVSGQNQQT

SEQ ID NO: 424 - protein, 14 aa, synthetic construct
GSSQSTGYQPNQQT

SEQ ID NO: 425 - protein, 14 aa, synthetic construct
GSLKPTTLGQNQQT

SEQ ID NO: 426 - protein, 14 aa, synthetic construct
GRMFSLGSGQNQQT

SEQ ID NO: 427 - protein, 14 aa, synthetic construct
GSGQNQQTALGVKC

SEQ ID NO: 428 - protein, 14 aa, synthetic construct
GAMVSHSSGQNQQT

SEQ ID NO: 429 - protein, 14 aa, synthetic construct
GSGQNQQRNSDSVT

SEQ ID NO: 430 - protein, 14 aa, synthetic construct
GSGQSMTLHLNQQT

SEQ ID NO: 431 - protein, 14 aa, synthetic construct
GSGQVHQAEVNQQT

SEQ ID NO: 432 - protein, 14 aa, synthetic construct
GSGQNQSQNHLQQT

SEQ ID NO: 433 - protein, 14 aa, synthetic construct
GSLLTTASGQNQQT

SEQ ID NO: 434 - protein, 14 aa, synthetic construct
GSGLIRTAAQNQQT

SEQ ID NO: 435 - protein, 14 aa, synthetic construct
GSGQNQQTVSRQST

SEQ ID NO: 436 - protein, 14 aa, synthetic construct
GSGQYANHGINQQT

SEQ ID NO: 437 - protein, 14 aa, synthetic construct
GSRSTGPSGQNQQT

SEQ ID NO: 438 - protein, 14 aa, synthetic construct
GRGVQQKLQQNQQT

SEQ ID NO: 439 - protein, 14 aa, synthetic construct
GSGQNQQVHLSTGT

SEQ ID NO: 440 - protein, 14 aa, synthetic construct
GSGQNQQLSAKSST

SEQ ID NO: 441 - protein, 14 aa, synthetic construct
GSGYKAARPQNQQT

SEQ ID NO: 442 - protein, 14 aa, synthetic construct
GSAGISPSGQNQQT

SEQ ID NO: 443 - protein, 14 aa, synthetic construct
GSGQNRAHAFLQQT

SEQ ID NO: 444 - protein, 14 aa, synthetic construct
GSGLSGITMQNQQT

SEQ ID NO: 445 - protein, 14 aa, synthetic construct
GPGSAHSSGQNQQT

SEQ ID NO: 446 - protein, 14 aa, synthetic construct
GSSHTQALGQNQQT

SEQ ID NO: 447 - protein, 14 aa, synthetic construct
GSGVHGVSSQNQQT

SEQ ID NO: 448 - protein, 14 aa, synthetic construct
GSSGRDMGGQNQQT

SEQ ID NO: 449 - protein, 14 aa, synthetic construct
GERAFPTSGQNQQT

SEQ ID NO: 450 - protein, 14 aa, synthetic construct
GGRIVSLSGQNQQT

SEQ ID NO: 451 - protein, 14 aa, synthetic construct
GSGQNSYSHTSQQT

SEQ ID NO: 452 - protein, 14 aa, synthetic construct
GLGYPGSSGQNQQT

SEQ ID NO: 453 - protein, 14 aa, synthetic construct
GSGPQSHTGQNQQT

SEQ ID NO: 454 - protein, 14 aa, synthetic construct
GSGQNQQLSRDAST

SEQ ID NO: 455 - protein, 14 aa, synthetic construct
GSGQILHSVPNQQT

SEQ ID NO: 456 - protein, 14 aa, synthetic construct
GSGFHTDSRQNQQT

SEQ ID NO: 457 - protein, 14 aa, synthetic construct
GSGQSHSLATNQQT

SEQ ID NO: 458 - protein, 14 aa, synthetic construct
GSGQNQQTLSKPWT

SEQ ID NO: 459 - protein, 14 aa, synthetic construct
GSGHAAISQQNQQT

SEQ ID NO: 460 - protein, 14 aa, synthetic construct
GSGQNQQQIGGNST

SEQ ID NO: 461 - protein, 14 aa, synthetic construct
GGGPMAGSGQNQQT

SEQ ID NO: 462 - protein, 14 aa, synthetic construct
GMRMEYQSGQNQQT

SEQ ID NO: 463 - protein, 14 aa, synthetic construct
GSGQNQQGTLLHQT

SEQ ID NO: 464 - protein, 14 aa, synthetic construct
GSGQNQRSSGGVQT

SEQ ID NO: 465 - protein, 14 aa, synthetic construct
GSGQNQRGALATQT

SEQ ID NO: 466 - protein, 14 aa, synthetic construct
GSGTVHAATQNQQT

SEQ ID NO: 467 - protein, 14 aa, synthetic construct
GSRMTQQFGQNQQT

SEQ ID NO: 468 - protein, 14 aa, synthetic construct
GSSSPGASGQNQQT

SEQ ID NO: 469 - protein, 14 aa, synthetic construct
GHPSPHVSGQNQQT

SEQ ID NO: 470 - protein, 14 aa, synthetic construct
GSGSHHASRQNQQT

SEQ ID NO: 471 - protein, 14 aa, synthetic construct
GAVGHSYSGQNQQT

SEQ ID NO: 472 - protein, 14 aa, synthetic construct
GSRSQYDIGQNQQT

SEQ ID NO: 473 - protein, 14 aa, synthetic construct
GSGQGPQERGNQQT

SEQ ID NO: 474 - protein, 14 aa, synthetic construct
GSIAHVGTGQNQQT

SEQ ID NO: 475 - protein, 14 aa, synthetic construct
GSGQNQQKQNHGNT

SEQ ID NO: 476 - protein, 14 aa, synthetic construct
GSGQNQQALGSQRT

SEQ ID NO: 477 - protein, 14 aa, synthetic construct
GSGAITHMPQNQQT

SEQ ID NO: 478 - protein, 14 aa, synthetic construct
GSGQRNPLLLNQQT

SEQ ID NO: 479 - protein, 14 aa, synthetic construct
GSSGIPVSHQNQQT

SEQ ID NO: 480 - protein, 14 aa, synthetic construct
GVHSLTPSGQNQQT

SEQ ID NO: 481 - protein, 14 aa, synthetic construct
GVIVLHGSGQNQQT

SEQ ID NO: 482 - protein, 14 aa, synthetic construct
GGTRVVDSGQNQQT

SEQ ID NO: 483 - protein, 14 aa, synthetic construct
GSGGVTYQSQNQQT

SEQ ID NO: 484 - protein, 14 aa, synthetic construct
GSGQNQAGHGPGQT

SEQ ID NO: 485 - protein, 14 aa, synthetic construct
GSGQLVTSGPNQQT

SEQ ID NO: 486 - protein, 14 aa, synthetic construct
GSGIAAQRTQNQQT

SEQ ID NO: 487 - protein, 14 aa, synthetic construct
GSTPAGVGGQNQQT

SEQ ID NO: 488 - protein, 14 aa, synthetic construct
GSGQNQQTSTGVHS

SEQ ID NO: 489 - protein, 14 aa, synthetic construct
GSGQIRQLVDNQQT

SEQ ID NO: 490 - protein, 14 aa, synthetic construct
GSLIGMQSGQNQQT

SEQ ID NO: 491 - protein, 14 aa, synthetic construct
GSGQIKGKMDNQQT

SEQ ID NO: 492 - protein, 14 aa, synthetic construct
GSGSDMSSWQNQQT

SEQ ID NO: 493 - protein, 14 aa, synthetic construct
GRGQNQQHTGLATT

SEQ ID NO: 494 - protein, 14 aa, synthetic construct
GSGQNQQTLYSSNT

SEQ ID NO: 495 - protein, 14 aa, synthetic construct
GSGQTQVLKSNQQT

SEQ ID NO: 496 - protein, 14 aa, synthetic construct
GSRTLSNVGQNQQT

SEQ ID NO: 497 - protein, 14 aa, synthetic construct
GSGVQHSLPQNQQT

SEQ ID NO: 498 - protein, 14 aa, synthetic construct
GNYLHQASGQNQQT

SEQ ID NO: 499 - protein, 14 aa, synthetic construct
GSGGTSVHQQNQQT

SEQ ID NO: 500 - protein, 14 aa, synthetic construct
GMDHSRPSGQNQQT

SEQ ID NO: 501 - protein, 14 aa, synthetic construct
GSGQNQQSMGTFTT

SEQ ID NO: 502 - protein, 14 aa, synthetic construct
GSGQNQQTPLRPPT

SEQ ID NO: 503 - protein, 14 aa, synthetic construct
GSGQNQHHSVSQQT

SEQ ID NO: 504 - protein, 14 aa, synthetic construct
GSGQLRSLSTNQQT

SEQ ID NO: 505 - protein, 14 aa, synthetic construct
GSGSPRQLSQNQQT

SEQ ID NO: 506 - protein, 14 aa, synthetic construct
GSGQNQQTTASSHT

SEQ ID NO: 507 - protein, 14 aa, synthetic construct
GRGQVVSTHQNQQT

SEQ ID NO: 508 - protein, 14 aa, synthetic construct
GSAQVSMVGQNQQT

SEQ ID NO: 509 - protein, 14 aa, synthetic construct
GSSTLVTIGKNQQT

SEQ ID NO: 510 - protein, 14 aa, synthetic construct
GFAHQASSGQNQQT

SEQ ID NO: 511 - protein, 14 aa, synthetic construct
GSGQPVLSISNQQT

SEQ ID NO: 512 - protein, 14 aa, synthetic construct
GSGQSHRSELNQQT

SEQ ID NO: 513 - protein, 14 aa, synthetic construct
GSSVGSPIGQNQQT

SEQ ID NO: 514 - protein, 14 aa, synthetic construct
GSGMPIRNVQNQQT

SEQ ID NO: 515 - protein, 14 aa, synthetic construct
GSSTRVDSGQNQQT

SEQ ID NO: 516 - protein, 14 aa, synthetic construct
GSGQNQQTAMRSTT

SEQ ID NO: 517 - protein, 14 aa, synthetic construct
GSGQNQQHSSSHLT

SEQ ID NO: 518 - protein, 14 aa, synthetic construct
GSRNGHAVGQNQQT

SEQ ID NO: 519 - protein, 14 aa, synthetic construct
GLGAYQSSGQNQQT

SEQ ID NO: 520 - protein, 14 aa, synthetic construct
GPGLSGHSGQNQQT

SEQ ID NO: 521 - protein, 14 aa, synthetic construct
GSTGIVSSGQNQQT

SEQ ID NO: 522 - protein, 14 aa, synthetic construct
GSRTTQVIGQNQQT

SEQ ID NO: 523 - protein, 14 aa, synthetic construct
GSGLLHRAQQNQQT

SEQ ID NO: 524 - protein, 14 aa, synthetic construct
GSGQNAQQAAAQQT

SEQ ID NO: 525 - protein, 14 aa, synthetic construct
GSGQNQQSALRTQT

SEQ ID NO: 526 - protein, 14 aa, synthetic construct
GSGFLSDTRQNQQT

SEQ ID NO: 527 - protein, 14 aa, synthetic construct
GSGLLYHDQQNQQT

SEQ ID NO: 528 - protein, 14 aa, synthetic construct
GSGQNQHYSLHKQT

SEQ ID NO: 529 - protein, 14 aa, synthetic construct
GSGHSPLPQQNQQT

SEQ ID NO: 530 - protein, 14 aa, synthetic construct
GNGHSMRPNQNQQT

SEQ ID NO: 531 - protein, 14 aa, synthetic construct
GSGLKWSTLQNQQT

SEQ ID NO: 532 - protein, 14 aa, synthetic construct
GSGQMGRQAVNQQT

SEQ ID NO: 533 - protein, 14 aa, synthetic construct
GSGQNQQTSGVLTL

SEQ ID NO: 534 - protein, 14 aa, synthetic construct
GSGQNQQALHNPHT

SEQ ID NO: 535 - protein, 14 aa, synthetic construct
GSGQNQQVIPNSKT

SEQ ID NO: 536 - protein, 14 aa, synthetic construct
GSPLQDRVGQNQQT

SEQ ID NO: 537 - protein, 14 aa, synthetic construct
GSGQNQYSSTNPQT

SEQ ID NO: 538 - protein, 14 aa, synthetic construct
GAMTVTISGQNQQT

SEQ ID NO: 539 - protein, 14 aa, synthetic construct
GSGQNQQLQTLIRT

SEQ ID NO: 540 - protein, 14 aa, synthetic construct
GSGLRQTSQQNQQT

SEQ ID NO: 541 - protein, 14 aa, synthetic construct
GSGQNQQTGLRQQT

SEQ ID NO: 542 - protein, 14 aa, synthetic construct
GSGQTRQMKDNQQT

SEQ ID NO: 543 - protein, 14 aa, synthetic construct
GSGQNHGLQSGQQT

SEQ ID NO: 544 - protein, 14 aa, synthetic construct
GSGQSHRQPENQQT

SEQ ID NO: 545 - protein, 14 aa, synthetic construct
GSGQDRHIVQNQQT

SEQ ID NO: 546 - protein, 14 aa, synthetic construct
GSGQNQQLPHSNLT

SEQ ID NO: 547 - protein, 14 aa, synthetic construct
GSGQLSVPYDNQQT

SEQ ID NO: 548 - protein, 14 aa, synthetic construct
GSGRNPQTQPLQQT

SEQ ID NO: 549 - protein, 14 aa, synthetic construct
GSGQPYSTGLNQQT

SEQ ID NO: 550 - protein, 14 aa, synthetic construct
GSGQNQQTHGGLRD

SEQ ID NO: 551 - protein, 14 aa, synthetic construct
GAYGMVSSGQNQQT

SEQ ID NO: 552 - protein, 14 aa, synthetic construct
GSGIQSSYSQNQQT

SEQ ID NO: 553 - protein, 14 aa, synthetic construct
GPRLSDQSGQNQQT

SEQ ID NO: 554 - protein, 14 aa, synthetic construct
GSGQNQQTHPSPCT

SEQ ID NO: 555 - protein, 14 aa, synthetic construct
GSGQSFQMHTNQQT

SEQ ID NO: 556 - protein, 14 aa, synthetic construct
GSGQNQQTGNPKHT

SEQ ID NO: 557 - protein, 14 aa, synthetic construct
GFSSAVHSGQNQQT

SEQ ID NO: 558 - protein, 14 aa, synthetic construct
GSGQNQQTSMSNAT

SEQ ID NO: 559 - protein, 14 aa, synthetic construct
GSGQDMKQHHNQQT

SEQ ID NO: 560 - protein, 14 aa, synthetic construct
GLRLSTPSGQNQQT

SEQ ID NO: 561 - protein, 14 aa, synthetic construct
GSGQNQQTSVYMNT

SEQ ID NO: 562 - protein, 14 aa, synthetic construct
GSGQNQYSQSSMQT

SEQ ID NO: 563 - protein, 14 aa, synthetic construct
GSGQNQQSMADHTT

SEQ ID NO: 564 - protein, 14 aa, synthetic construct
GWERSFVSGQNQQT

SEQ ID NO: 565 - protein, 14 aa, synthetic construct
GLLAGKSSGQNQQT

SEQ ID NO: 566 - protein, 14 aa, synthetic construct
GKSFVPQSGQNQQT

SEQ ID NO: 567 - protein, 14 aa, synthetic construct
GSGQMQSAGSNQQT

SEQ ID NO: 568 - protein, 14 aa, synthetic construct
GSDQNQRLTSSMQT

SEQ ID NO: 569 - protein, 14 aa, synthetic construct
GESRAVLSGQNQQT

SEQ ID NO: 570 - protein, 14 aa, synthetic construct
GSVFGVPSGQNQQT

SEQ ID NO: 571 - protein, 14 aa, synthetic construct
GSGLPDRNLQNQQT

SEQ ID NO: 572 - protein, 14 aa, synthetic construct
GSGTHNSAIQNQQT

SEQ ID NO: 573 - protein, 14 aa, synthetic construct
GSGMIIASMQNQQT

SEQ ID NO: 574 - protein, 14 aa, synthetic construct
GGITWTDSGQNQQT

SEQ ID NO: 575 - protein, 14 aa, synthetic construct
GSGQNQQASGRQQT

SEQ ID NO: 576 - protein, 14 aa, synthetic construct
GSGQNQQPHLKSLT

SEQ ID NO: 577 - protein, 14 aa, synthetic construct
GPPQHMTSGQNQQT

SEQ ID NO: 578 - protein, 14 aa, synthetic construct
GSGQNQQASLPSRT

SEQ ID NO: 579 - protein, 14 aa, synthetic construct
GSGQIVSTQTNQQT

SEQ ID NO: 580 - protein, 14 aa, synthetic construct
GSGKGHSAGQNQQT

SEQ ID NO: 581 - protein, 14 aa, synthetic construct
GSGQNTRLQLGQQT

SEQ ID NO: 582 - protein, 14 aa, synthetic construct
GSVGSRPVGQNQQT

SEQ ID NO: 583 - protein, 14 aa, synthetic construct
GSSHTLALGQNQQT

SEQ ID NO: 584 - protein, 14 aa, synthetic construct
GMYEYSQSGQNQQT

SEQ ID NO: 585 - protein, 14 aa, synthetic construct
GNGQNQQHSILHGT

SEQ ID NO: 586 - protein, 14 aa, synthetic construct
GSGYNQPHLQNQQT

SEQ ID NO: 587 - protein, 14 aa, synthetic construct
GPLVNASSGQNQQT

SEQ ID NO: 588 - protein, 14 aa, synthetic construct
GSGQNQQVLTTART

SEQ ID NO: 589 - protein, 14 aa, synthetic construct
GSGQNQHSVHNDQT

SEQ ID NO: 590 - protein, 14 aa, synthetic construct
GAGLIMHSGQNQQT

SEQ ID NO: 591 - protein, 14 aa, synthetic construct
GMGRHSASGQNQQT

SEQ ID NO: 592 - protein, 14 aa, synthetic construct
GSHSQSGHGQNQQT

SEQ ID NO: 593 - protein, 14 aa, synthetic construct
GSSTTIVSGQNHQT

SEQ ID NO: 594 - protein, 14 aa, synthetic construct
GRHLVTASGQNQQT

SEQ ID NO: 595 - protein, 14 aa, synthetic construct
GSGQNQQHANLNQT

SEQ ID NO: 596 - protein, 14 aa, synthetic construct
GSGSTHSKAQNQQT

SEQ ID NO: 597 - protein, 14 aa, synthetic construct
GSGQNKQMLSGNTT

SEQ ID NO: 598 - protein, 14 aa, synthetic construct
GSGQVHNPTQNQQT

SEQ ID NO: 599 - protein, 14 aa, synthetic construct
GSGQNQQIPHVHQT

SEQ ID NO: 600 - protein, 14 aa, synthetic construct
GSLHAGLSGQNQQT

SEQ ID NO: 601 - protein, 14 aa, synthetic construct
GPAQHGTSGQNQQT

SEQ ID NO: 602 - protein, 14 aa, synthetic construct
GEKAVTSSGQNQQT

SEQ ID NO: 603 - protein, 14 aa, synthetic construct
GSGQNQQTMANGQR

SEQ ID NO: 604 - protein, 14 aa, synthetic construct
GSGSPHSKDQNQQT

SEQ ID NO: 605 - protein, 14 aa, synthetic construct
GSFSMGYGGQNQQT

SEQ ID NO: 606 - protein, 14 aa, synthetic construct
GSGTHLVSLQNQQT

SEQ ID NO: 607 - protein, 14 aa, synthetic construct
GSGQMQPHVQNQQT

SEQ ID NO: 608 - protein, 14 aa, synthetic construct
GSGQNQQVAGLNNT

SEQ ID NO: 609 - protein, 14 aa, synthetic construct
GSSQNQQHDMRLRT

SEQ ID NO: 610 - protein, 14 aa, synthetic construct
GPASLPISGQNQQT

SEQ ID NO: 611 - protein, 14 aa, synthetic construct
GSGQNQQPPLATRT

SEQ ID NO: 612 - protein, 14 aa, synthetic construct
GSSRVPVSGQNQQT

SEQ ID NO: 613 - protein, 14 aa, synthetic construct
GSGQNQQTNLGHTT

SEQ ID NO: 614 - protein, 14 aa, synthetic construct
GSGQNQQLVSRVQT

SEQ ID NO: 615 - protein, 14 aa, synthetic construct
GPNSYPVSGQKQQT

SEQ ID NO: 616 - protein, 14 aa, synthetic construct
GHAHYQASGQNQQT

SEQ ID NO: 617 - protein, 14 aa, synthetic construct
GSGQALLSTGNQQT

SEQ ID NO: 618 - protein, 14 aa, synthetic construct
GSGQLPRQMTNQQT

SEQ ID NO: 619 - protein, 14 aa, synthetic construct
GSGFPKSTEQNQQT

SEQ ID NO: 620 - protein, 14 aa, synthetic construct
GSRETSLSGQNQQT

SEQ ID NO: 621 - protein, 14 aa, synthetic construct
GSGQNQQGTGVSHT

SEQ ID NO: 622 - protein, 14 aa, synthetic construct
GSRTVPVYGQNQQT

SEQ ID NO: 623 - protein, 14 aa, synthetic construct
GSNAQSAHGQNQQT

SEQ ID NO: 624 - protein, 14 aa, synthetic construct
GAFHLAASGQNQQT

SEQ ID NO: 625 - protein, 14 aa, synthetic construct
GSGQYRSSSDNQQT

SEQ ID NO: 626 - protein, 14 aa, synthetic construct
GSGQVYISTPNQQT

SEQ ID NO: 627 - protein, 14 aa, synthetic construct
GSGVSTQLLQNQQT

SEQ ID NO: 628 - protein, 14 aa, synthetic construct
GSGQLGLSVTNQQT

SEQ ID NO: 629 - protein, 14 aa, synthetic construct
GSGSNMRLSQNQQT

SEQ ID NO: 630 - protein, 14 aa, synthetic construct
GSGQNLHSGLPQQT

SEQ ID NO: 631 - protein, 14 aa, synthetic construct
GSSHTLALGQNKQT

SEQ ID NO: 632 - protein, 14 aa, synthetic construct
GSGQNQHSLPAHRT

SEQ ID NO: 633 - protein, 14 aa, synthetic construct
GSGQNQGTVYPNQT

SEQ ID NO: 634 - protein, 14 aa, synthetic construct
GSGQNQQPSLRQST

SEQ ID NO: 635 - protein, 14 aa, synthetic construct
GSGQNARLKDNQQT

SEQ ID NO: 636 - protein, 14 aa, synthetic construct
GHAGSTGSGQNQQT

SEQ ID NO: 637 - protein, 14 aa, synthetic construct
GSGQALSSSGNQQT

SEQ ID NO: 638 - protein, 14 aa, synthetic construct
GSGASESHRQNQQT

SEQ ID NO: 639 - protein, 14 aa, synthetic construct
GVGVITSSGQNQQT

SEQ ID NO: 640 - protein, 14 aa, synthetic construct
GSLYGQSLGQNQQT

SEQ ID NO: 641 - protein, 14 aa, synthetic construct
GSGQMSDVHGNQQT

SEQ ID NO: 642 - protein, 14 aa, synthetic construct
GSGQNQQHSSKATT

SEQ ID NO: 643 - protein, 14 aa, synthetic construct
GSGQNQQTSVSQQT

SEQ ID NO: 644 - protein, 14 aa, synthetic construct
GSGQKMWKLDNQQT

SEQ ID NO: 645 - protein, 14 aa, synthetic construct
GSGQNVSMQVNQQT

SEQ ID NO: 646 - protein, 14 aa, synthetic construct
GSGQNQRATLSNQT

SEQ ID NO: 647 - protein, 14 aa, synthetic construct
GSGQASSKSANQQT

SEQ ID NO: 648 - protein, 14 aa, synthetic construct
GSGKNQTPIPKGQT

SEQ ID NO: 649 - protein, 14 aa, synthetic construct
GSGQNQQTRQEGST

SEQ ID NO: 650 - protein, 14 aa, synthetic construct
GASSLATSGQNQQT

SEQ ID NO: 651 - protein, 14 aa, synthetic construct
GSGQRGSLTENQQT

SEQ ID NO: 652 - protein, 14 aa, synthetic construct
GSEQTRQRGQNQQT

SEQ ID NO: 653 - protein, 14 aa, synthetic construct
GSGQNQQTLTASKE

SEQ ID NO: 654 - protein, 14 aa, synthetic construct
GSGTSGKTGKNQQT

SEQ ID NO: 655 - protein, 14 aa, synthetic construct
GQLVTFTSGQNQQT

SEQ ID NO: 656 - protein, 14 aa, synthetic construct
GSGQNQQSANKILT

SEQ ID NO: 657 - protein, 14 aa, synthetic construct
GSGQNQQHHSSHTT

SEQ ID NO: 658 - protein, 14 aa, synthetic construct
GSGQNQKGMQPNQT

SEQ ID NO: 659 - protein, 14 aa, synthetic construct
GSGQLVSGLYNQQT

SEQ ID NO: 660 - protein, 14 aa, synthetic construct
GSSVGVPSGQNQQT

SEQ ID NO: 661 - protein, 14 aa, synthetic construct
GSGQNQQWDSRRQT

SEQ ID NO: 662 - protein, 14 aa, synthetic construct
GSEQTRQSGQNQQT

SEQ ID NO: 663 - protein, 14 aa, synthetic construct
GSGIGSHIPQNQQT

SEQ ID NO: 664 - protein, 14 aa, synthetic construct
GSGQNQRLHGVDQT

SEQ ID NO: 665 - protein, 14 aa, synthetic construct
GEVSRVLSGQNQQT

SEQ ID NO: 666 - protein, 14 aa, synthetic construct
GSGQNQQKVSPLLT

SEQ ID NO: 667 - protein, 14 aa, synthetic construct
GSGLALERSQNQQT

SEQ ID NO: 668 - protein, 14 aa, synthetic construct
GPDRIGSSGQNQQT

SEQ ID NO: 669 - protein, 14 aa, synthetic construct
GSGQNQDHQNKQQT

SEQ ID NO: 670 - protein, 14 aa, synthetic construct
GSGQNQQTALYNNT

SEQ ID NO: 671 - protein, 14 aa, synthetic construct
GSGAVHLTAQNQQT

SEQ ID NO: 672 - protein, 14 aa, synthetic construct
GSLVSTQSGQNQQT

SEQ ID NO: 673 - protein, 14 aa, synthetic construct
GSGVSARMVQNQQT

SEQ ID NO: 674 - protein, 14 aa, synthetic construct
GSGQTRMPLANQQT

SEQ ID NO: 675 - protein, 14 aa, synthetic construct
GSGISSRNMQNQQT

SEQ ID NO: 676 - protein, 14 aa, synthetic construct
GSGEKVHSGQNQQT

SEQ ID NO: 677 - protein, 14 aa, synthetic construct
GSGQNQQKLSSMST

SEQ ID NO: 678 - protein, 14 aa, synthetic construct
GSGQNQQTGQHMRV

SEQ ID NO: 679 - protein, 14 aa, synthetic construct
GSGMIHTTAQNQQT

SEQ ID NO: 680 - protein, 14 aa, synthetic construct
GSGQNWPALKGQQT

SEQ ID NO: 681 - protein, 14 aa, synthetic construct
GASHMSISGQNQQT

SEQ ID NO: 682 - protein, 14 aa, synthetic construct
GSDQNQQLGYSKQT

SEQ ID NO: 683 - protein, 14 aa, synthetic construct
GIPSIRESGQNQQT

SEQ ID NO: 684 - protein, 14 aa, synthetic construct
GSGIPSVKFQNQQT

SEQ ID NO: 685 - protein, 14 aa, synthetic construct
GSGQNQQTSVSQNV

SEQ ID NO: 686 - protein, 14 aa, synthetic construct
GSGQNQQIGESRMT

SEQ ID NO: 687 - protein, 14 aa, synthetic construct
GSGSSSMSFQNQQT

SEQ ID NO: 688 - protein, 14 aa, synthetic construct
GSGQKQERAVSKQT

SEQ ID NO: 689 - protein, 14 aa, synthetic construct
GCTTRLNSGQNQQT

SEQ ID NO: 690 - protein, 14 aa, synthetic construct
GSGQNQQIISTKIT

SEQ ID NO: 691 - protein, 14 aa, synthetic construct
GSGQNQQKSLNGNT

SEQ ID NO: 692 - protein, 14 aa, synthetic construct
GSGIPAPRLQNQQT

SEQ ID NO: 693 - protein, 14 aa, synthetic construct
GSGQIRESMGNQQT

SEQ ID NO: 694 - protein, 14 aa, synthetic construct
GSGQNSGVHFNQQT

SEQ ID NO: 695 - protein, 14 aa, synthetic construct
GSGQNIGHSLPQQT

SEQ ID NO: 696 - protein, 14 aa, synthetic construct
GSGERSISVQNQQT

SEQ ID NO: 697 - protein, 14 aa, synthetic construct
GSGLKPNVLQNQQT

SEQ ID NO: 698 - protein, 14 aa, synthetic construct
GSGQVAYAQGNQQT

SEQ ID NO: 699 - protein, 14 aa, synthetic construct
GSGQSSYGSGNQQT

SEQ ID NO: 700 - protein, 14 aa, synthetic construct
GSGQNQAMTHGDQT

SEQ ID NO: 701 - protein, 14 aa, synthetic construct
GSGQNQALVSMGQT

SEQ ID NO: 702 - protein, 14 aa, synthetic construct
GSGQNPSFMRGQQT

SEQ ID NO: 703 - protein, 14 aa, synthetic construct
GSGQNQQSHLRTNT

SEQ ID NO: 704 - protein, 14 aa, synthetic construct
GYTRLETSGQNQQT

SEQ ID NO: 705 - protein, 14 aa, synthetic construct
GSGQSYDMRGNQQT

SEQ ID NO: 706 - protein, 14 aa, synthetic construct
GSRTTQDIGQNQQT

SEQ ID NO: 707 - protein, 14 aa, synthetic construct
GSGHPYKAAQNQQT

SEQ ID NO: 708 - protein, 14 aa, synthetic construct
GRLSNAHGGQNQQT

SEQ ID NO: 709 - protein, 14 aa, synthetic construct
GSGQNQRAVLNDQT

SEQ ID NO: 710 - protein, 14 aa, synthetic construct
GGSHTYGGGQNQQT

SEQ ID NO: 711 - protein, 14 aa, synthetic construct
GSSVNSMIGQNQQT

SEQ ID NO: 712 - protein, 14 aa, synthetic construct
GNSSMMGSGQNQQT

SEQ ID NO: 713 - protein, 14 aa, synthetic construct
GNRDRPSSGQNQQT

SEQ ID NO: 714 - protein, 14 aa, synthetic construct
GSGNMHASRQNQQT

SEQ ID NO: 715 - protein, 14 aa, synthetic construct
GFIFPKVSGQNQQT

SEQ ID NO: 716 - protein, 14 aa, synthetic construct
GSGQNQQLKNSTST

SEQ ID NO: 717 - protein, 14 aa, synthetic construct
GSGQNQQSQYMPRT

SEQ ID NO: 718 - protein, 14 aa, synthetic construct
GSGQRMADIGNQQT

SEQ ID NO: 719 - protein, 14 aa, synthetic construct
GSGQNQSHYPSQQT

SEQ ID NO: 720 - protein, 14 aa, synthetic construct
GSDGKMHRGQNQQT

SEQ ID NO: 721 - protein, 14 aa, synthetic construct
GSGSVGFIGQNQQT

SEQ ID NO: 722 - protein, 14 aa, synthetic construct
GLHGMTLSGQNQQT

SEQ ID NO: 723 - protein, 14 aa, synthetic construct
GSDQSKRGDSNQQT

SEQ ID NO: 724 - protein, 14 aa, synthetic construct
GSLFLATGGQNQQT

SEQ ID NO: 725 - protein, 14 aa, synthetic construct
GSGQNQQPSAFSKT

SEQ ID NO: 726 - protein, 14 aa, synthetic construct
GSGQLPQSGLNQQT

SEQ ID NO: 727 - protein, 14 aa, synthetic construct
GSGSKQNALQNQQT

SEQ ID NO: 728 - protein, 14 aa, synthetic construct
GSGQRRELSQNQQT

SEQ ID NO: 729 - protein, 14 aa, synthetic construct
GSGQREPKASNQQT

SEQ ID NO: 730 - protein, 14 aa, synthetic construct
GSGQNQQHPSTQQT

SEQ ID NO: 731 - protein, 14 aa, synthetic construct
GSQSTLGLGQNQQT

SEQ ID NO: 732 - protein, 14 aa, synthetic construct
GSGQNQQMPGLSST

SEQ ID NO: 733 - protein, 14 aa, synthetic construct
GSGQNQQTVGGKNL

SEQ ID NO: 734 - protein, 14 aa, synthetic construct
GSSREFHSGQNQQT

SEQ ID NO: 735 - protein, 14 aa, synthetic construct
GSGQNQQTVPSNLV

SEQ ID NO: 736 - protein, 14 aa, synthetic construct
GSGQNAYSSQAQQT

SEQ ID NO: 737 - protein, 14 aa, synthetic construct
GSGQNKDHSTRRQT

SEQ ID NO: 738 - protein, 14 aa, synthetic construct
GQLGSVGSGQDQQT

SEQ ID NO: 739 - protein, 14 aa, synthetic construct
GSGQHAAPGHNQQT

SEQ ID NO: 740 - protein, 14 aa, synthetic construct
GSGQNQQTSQSPPT

SEQ ID NO: 741 - protein, 14 aa, synthetic construct
GSGNYRDHEQNQQT

SEQ ID NO: 742 - protein, 14 aa, synthetic construct
GSGQHSNQHVNQQT

SEQ ID NO: 743 - protein, 14 aa, synthetic construct
GSGQTARNGINQQT

SEQ ID NO: 744 - protein, 14 aa, synthetic construct
GSGQNQQHYGSQGT

SEQ ID NO: 745 - protein, 14 aa, synthetic construct
GSGSPQASRQNQQT

SEQ ID NO: 746 - protein, 14 aa, synthetic construct
GSGFSHSMGKNQQT

SEQ ID NO: 747 - protein, 14 aa, synthetic construct
GSGQSHSLETNQQT

SEQ ID NO: 748 - protein, 14 aa, synthetic construct
GTEQTRQSGQNQQT

SEQ ID NO: 749 - protein, 14 aa, synthetic construct
GSGRHLASVQNQQT

SEQ ID NO: 750 - protein, 14 aa, synthetic construct
GLGSKNHSGQNQQT

SEQ ID NO: 751 - protein, 14 aa, synthetic construct
GSGQNQQTSHFPSA

SEQ ID NO: 752 - protein, 14 aa, synthetic construct
GSGQLSGTPQNQQT

SEQ ID NO: 753 - protein, 14 aa, synthetic construct
GSGQNQQAPHKKET

SEQ ID NO: 754 - protein, 14 aa, synthetic construct
GSGQNQQTLRGSLE

SEQ ID NO: 755 - protein, 14 aa, synthetic construct
GSIAMTSHGQNQQT

SEQ ID NO: 756 - protein, 14 aa, synthetic construct
GSPGVSPSGQNQQT

SEQ ID NO: 757 - protein, 14 aa, synthetic construct
GSGQNQQTGSSSRV

SEQ ID NO: 758 - protein, 14 aa, synthetic construct
GSGQHLPLLGNQQT

SEQ ID NO: 759 - protein, 14 aa, synthetic construct
GSDHSHRGGQNQQT

SEQ ID NO: 760 - protein, 14 aa, synthetic construct
GSGIVTKLGQNQQT

SEQ ID NO: 761 - protein, 14 aa, synthetic construct
GSGQDVTKTGNQQT

SEQ ID NO: 762 - protein, 14 aa, synthetic construct
GSGQNQQSHGRIGT

SEQ ID NO: 763 - protein, 14 aa, synthetic construct
GSGQNQQINHRSPT

SEQ ID NO: 764 - protein, 14 aa, synthetic construct
GSGDDSRVGQNQQT

SEQ ID NO: 765 - protein, 14 aa, synthetic construct
GSGQSTLKRINQQT

SEQ ID NO: 766 - protein, 14 aa, synthetic construct
GSGSQHSKAQNQQT

SEQ ID NO: 767 - protein, 14 aa, synthetic construct
GSGQNQQHASSNNT

SEQ ID NO: 768 - protein, 14 aa, synthetic construct
GSRTYQVSGQNQQT

SEQ ID NO: 769 - protein, 14 aa, synthetic construct
GSGQNQGLLSSPQT

SEQ ID NO: 770 - protein, 14 aa, synthetic construct
GSGGGLQHNQNQQT

SEQ ID NO: 771 - protein, 14 aa, synthetic construct
GSGQNQQTTAATRM

SEQ ID NO: 772 - protein, 14 aa, synthetic construct
GSGQNQRASILVQT

SEQ ID NO: 773 - protein, 14 aa, synthetic construct
GSGQNLGLLGAQQT

SEQ ID NO: 774 - protein, 14 aa, synthetic construct
GSLDLGRSGQNQQT

SEQ ID NO: 775 - protein, 14 aa, synthetic construct
GNSQVKVSGQNQQT

SEQ ID NO: 776 - protein, 14 aa, synthetic construct
GSSGSHQYGQNQQT

SEQ ID NO: 777 - protein, 14 aa, synthetic construct
GSGQNQQQRDGTLT

SEQ ID NO: 778 - protein, 14 aa, synthetic construct
GRGQHVSVANNQQT

SEQ ID NO: 779 - protein, 14 aa, synthetic construct
GDSSSRISGQNQQT

SEQ ID NO: 780 - protein, 14 aa, synthetic construct
GSGQNQQHSLSSQT

SEQ ID NO: 781 - protein, 14 aa, synthetic construct
GSLMDVHRGQNQQT

SEQ ID NO: 782 - protein, 14 aa, synthetic construct
GSIQYQSSGQNQQT

SEQ ID NO: 783 - protein, 14 aa, synthetic construct
GLGSKNPSGQNQQT

SEQ ID NO: 784 - protein, 14 aa, synthetic construct
GSGQLVLTLQNQQT

SEQ ID NO: 785 - protein, 14 aa, synthetic construct
GSGQNQQTSQPLPG

SEQ ID NO: 786 - protein, 14 aa, synthetic construct
GSGQNQQNLGKLNT

SEQ ID NO: 787 - protein, 14 aa, synthetic construct
GTTAHQPSGQNQQT

SEQ ID NO: 788 - protein, 14 aa, synthetic construct
GSGQNRAQIGTQQT

SEQ ID NO: 789 - protein, 14 aa, synthetic construct
GSGQYVHVSSNQQT

SEQ ID NO: 790 - protein, 14 aa, synthetic construct
GSGQNQQTAHAFNI

SEQ ID NO: 791 - protein, 14 aa, synthetic construct
GSGQNQRTMVATQT

SEQ ID NO: 792 - protein, 14 aa, synthetic construct
GSGQNPIRGAMQQT

SEQ ID NO: 793 - protein, 14 aa, synthetic construct
GSGYVITGSQNQQT

SEQ ID NO: 794 - protein, 14 aa, synthetic construct
GRGPKQSNIQNQQT

SEQ ID NO: 795 - protein, 14 aa, synthetic construct
GSGQNQQTMLGKPC

SEQ ID NO: 796 - protein, 14 aa, synthetic construct
GSGQNQQVGSTVRT

SEQ ID NO: 797 - protein, 14 aa, synthetic construct
GNVTTQKSGQNQQT

SEQ ID NO: 798 - protein, 14 aa, synthetic construct
GSGNPVSHLQNQQT

SEQ ID NO: 799 - protein, 14 aa, synthetic construct
GSLSHMESGQNQQT

SEQ ID NO: 800 - protein, 14 aa, synthetic construct
GRAPTNLSGQNQQT

SEQ ID NO: 801 - protein, 14 aa, synthetic construct
GSGQNQQTVMTARA

SEQ ID NO: 802 - protein, 14 aa, synthetic construct
GSGMPASRLQNQQT

SEQ ID NO: 803 - protein, 14 aa, synthetic construct
GVVRNHQSGQNQQT

SEQ ID NO: 804 - protein, 14 aa, synthetic construct
GSGQNQHSVQVRQT

SEQ ID NO: 805 - protein, 14 aa, synthetic construct
GSGQNTGHLTMQQT

SEQ ID NO: 806 - protein, 14 aa, synthetic construct
GSGQNQQYAGKILT

SEQ ID NO: 807 - protein, 14 aa, synthetic construct
GSGNPHVRNQNQQT

SEQ ID NO: 808 - protein, 14 aa, synthetic construct
GSGQNGGSSNRQQT

SEQ ID NO: 809 - protein, 14 aa, synthetic construct
GSGQRLSQGVNHQT

SEQ ID NO: 810 - protein, 14 aa, synthetic construct
GSGQNAHAKEGQQT

SEQ ID NO: 811 - protein, 14 aa, synthetic construct
GSSPAPNSGQNQQT

SEQ ID NO: 812 - protein, 14 aa, synthetic construct
GLAHKTSSGQNQQT

SEQ ID NO: 813 - protein, 14 aa, synthetic construct
GSGQNQQTPGAHKT

SEQ ID NO: 814 - protein, 14 aa, synthetic construct
GSGQNQQSLSGSFT

SEQ ID NO: 815 - protein, 14 aa, synthetic construct
GSGQNQQSTGTSRT

SEQ ID NO: 816 - protein, 14 aa, synthetic construct
GSGQNQQTVQSNLV

SEQ ID NO: 817 - protein, 14 aa, synthetic construct
GSGQNQQLGSRQCT

SEQ ID NO: 818 - protein, 14 aa, synthetic construct
GSGQNQYLRLELQT

SEQ ID NO: 819 - protein, 14 aa, synthetic construct
GSGQNQQTSPRLQT

SEQ ID NO: 820 - protein, 14 aa, synthetic construct
GSGQNQQTTSSNMT

SEQ ID NO: 821 - protein, 14 aa, synthetic construct
GTASTYNSGQNQQT

SEQ ID NO: 822 - protein, 14 aa, synthetic construct
GSGQNQQTMPQHKI

SEQ ID NO: 823 - protein, 14 aa, synthetic construct
GSGQSHLHTGNQQT

SEQ ID NO: 824 - protein, 14 aa, synthetic construct
GVKGVGHSGQNQQT

SEQ ID NO: 825 - protein, 14 aa, synthetic construct
GSGKVTKQSQNQQT

SEQ ID NO: 826 - protein, 14 aa, synthetic construct
GSGQNQQTALEKSL

SEQ ID NO: 827 - protein, 14 aa, synthetic construct
GSGYKDTYGQNQQT

SEQ ID NO: 828 - protein, 14 aa, synthetic construct
GSGQNQQSGTFLST

SEQ ID NO: 829 - protein, 14 aa, synthetic construct
GSGQNTGQHMMQQT

SEQ ID NO: 830 - protein, 14 aa, synthetic construct
GSGKNQQRPGLDQT

SEQ ID NO: 831 - protein, 14 aa, synthetic construct
GSGQSREISLNQQT

SEQ ID NO: 832 - protein, 14 aa, synthetic construct
GTPTSPSSGQNQQT

SEQ ID NO: 833 - protein, 14 aa, synthetic construct
GKPAGGLSGQNQQT

SEQ ID NO: 834 - protein, 14 aa, synthetic construct
GSGQNHRSADMQQT

SEQ ID NO: 835 - protein, 14 aa, synthetic construct
GSGQNQQTLPSLSL

SEQ ID NO: 836 - protein, 14 aa, synthetic construct
GSPYMGATGQNQQT

SEQ ID NO: 837 - protein, 14 aa, synthetic construct
GSGHAKAVGQNQQT

SEQ ID NO: 838 - protein, 14 aa, synthetic construct
GHMKGVTSGQNQQT

SEQ ID NO: 839 - protein, 14 aa, synthetic construct
GSGQNQKILTLDQT

SEQ ID NO: 840 - protein, 14 aa, synthetic construct
GSGQNQQTKVGHSA

SEQ ID NO: 841 - protein, 14 aa, synthetic construct
GIARTTISGQNQQT

SEQ ID NO: 842 - protein, 14 aa, synthetic construct
GSGQNQQTSVGFRT

SEQ ID NO: 843 - protein, 14 aa, synthetic construct
GSGQNQQTMIANIR

SEQ ID NO: 844 - protein, 14 aa, synthetic construct
GDMTRSSSGQNQQT

SEQ ID NO: 845 - protein, 14 aa, synthetic construct
GSGHMSDLRQNQQT

SEQ ID NO: 846 - protein, 14 aa, synthetic construct
GRGAVMASGQNQQT

SEQ ID NO: 847 - protein, 14 aa, synthetic construct
GSGQNQQLSGKSVT

SEQ ID NO: 848 - protein, 14 aa, synthetic construct
GSHTLVVSGQNQQT

SEQ ID NO: 849 - protein, 14 aa, synthetic construct
GSGPWSAGLQNQQT

SEQ ID NO: 850 - protein, 14 aa, synthetic construct
GSGQHSPHALNQQT

SEQ ID NO: 851 - protein, 14 aa, synthetic construct
GSGQNQQPNSGSMT

SEQ ID NO: 852 - protein, 14 aa, synthetic construct
GSGLAHLGGQNQQT

SEQ ID NO: 853 - protein, 14 aa, synthetic construct
GSSVRYEPKQNQQT

SEQ ID NO: 854 - protein, 14 aa, synthetic construct
GSGQNQQARPLELT

SEQ ID NO: 855 - protein, 14 aa, synthetic construct
GSGQPRSTGINQQT

SEQ ID NO: 856 - protein, 14 aa, synthetic construct
GSGQNQANWVKVQT

SEQ ID NO: 857 - protein, 14 aa, synthetic construct
GSGHLFQSGQNQQT

SEQ ID NO: 858 - protein, 14 aa, synthetic construct
GSGQNRGISISQQT

SEQ ID NO: 859 - protein, 14 aa, synthetic construct
GSGTHYDNRQNQQT

SEQ ID NO: 860 - protein, 14 aa, synthetic construct
GSGQNQQTSTTPLP

SEQ ID NO: 861 - protein, 14 aa, synthetic construct
GSGQVHASQVNQKT

SEQ ID NO: 862 - protein, 14 aa, synthetic construct
GSSGHRESGQNQQT

SEQ ID NO: 863 - protein, 14 aa, synthetic construct
GLSAEKSSGQNQQT

SEQ ID NO: 864 - protein, 14 aa, synthetic construct
GSGQEHRSLANQQT

SEQ ID NO: 865 - protein, 14 aa, synthetic construct
GSGQTVVRIANQQT

SEQ ID NO: 866 - protein, 14 aa, synthetic construct
GSGQNVSSVHRQQT

SEQ ID NO: 867 - protein, 14 aa, synthetic construct
GSGASRMSIQNQQT

SEQ ID NO: 868 - protein, 14 aa, synthetic construct
GVAFIGSSGQNQQT

SEQ ID NO: 869 - protein, 14 aa, synthetic construct
GSGQNQQTVPTRQT

SEQ ID NO: 870 - protein, 14 aa, synthetic construct
GSGQAAKSSQNQQT

SEQ ID NO: 871 - protein, 14 aa, synthetic construct
GSGQNQQVAIRTST

SEQ ID NO: 872 - protein, 14 aa, synthetic construct
GSVHMQNAGQNQQT

SEQ ID NO: 873 - protein, 14 aa, synthetic construct
GSGMRQAGVQNQQT

SEQ ID NO: 874 - protein, 14 aa, synthetic construct
GSGQNQQVGGKTVT

SEQ ID NO: 875 - protein, 14 aa, synthetic construct
GVHDMRVSGQNQQT

SEQ ID NO: 876 - protein, 14 aa, synthetic construct
GSGQHVSVANNQQT

SEQ ID NO: 877 - protein, 14 aa, synthetic construct
GSAAMSVRGQNQQT

SEQ ID NO: 878 - protein, 14 aa, synthetic construct
GVSRGGPSGQNQQT

SEQ ID NO: 879 - protein, 14 aa, synthetic construct
GSGQMVHTIGNQQT

SEQ ID NO: 880 - protein, 14 aa, synthetic construct
GRGGSMAETQNQQT

SEQ ID NO: 881 - protein, 14 aa, synthetic construct
GSGHTNPTRQNQQT

SEQ ID NO: 882 - protein, 14 aa, synthetic construct
GSGEAARYEQNQQT

SEQ ID NO: 883 - protein, 14 aa, synthetic construct
GSGQNERHLVLQQT

SEQ ID NO: 884 - protein, 14 aa, synthetic construct
GSGQNQQSKQQVLT

SEQ ID NO: 885 - protein, 14 aa, synthetic construct
GSGQARAHRGNQQT

SEQ ID NO: 886 - protein, 14 aa, synthetic construct
GSGQNQQPLDTSRT

SEQ ID NO: 887 - protein, 14 aa, synthetic construct
GSGQNQQLANMVTT

SEQ ID NO: 888 - protein, 14 aa, synthetic construct
GSGQMKDLHRNQQT

SEQ ID NO: 889 - protein, 14 aa, synthetic construct
GSGQNQHLSSFVQT

SEQ ID NO: 890 - protein, 14 aa, synthetic construct
GSGQNQQPSSRVTT

SEQ ID NO: 891 - protein, 14 aa, synthetic construct
GSGQNQQLAITLGT

SEQ ID NO: 892 - protein, 14 aa, synthetic construct
GSGQNQQTVGNPAT

SEQ ID NO: 893 - protein, 14 aa, synthetic construct
GSGQNQGRAHPMQT

SEQ ID NO: 894 - protein, 14 aa, synthetic construct
GSGQLIASVVNQQT

SEQ ID NO: 895 - protein, 14 aa, synthetic construct
GSSVRSLVGQNQQT

SEQ ID NO: 896 - protein, 14 aa, synthetic construct
GGAGSAHSGQNQQT

SEQ ID NO: 897 - protein, 14 aa, synthetic construct
GSDQNQQTMSSTRT

SEQ ID NO: 898 - protein, 14 aa, synthetic construct
GSGQNQQMAGAFRT

SEQ ID NO: 899 - protein, 14 aa, synthetic construct
GSLGNLQRGQNQQT

SEQ ID NO: 900 - protein, 14 aa, synthetic construct
GSGPSISHGQNQQT

SEQ ID NO: 901 - protein, 14 aa, synthetic construct
GSGQNQQSSFNVQT

SEQ ID NO: 902 - protein, 14 aa, synthetic construct
GSGQNQQTGQATHN

SEQ ID NO: 903 - protein, 14 aa, synthetic construct
VSGSPHSKAQNQQT

SEQ ID NO: 904 - protein, 14 aa, synthetic construct
CSGSPHSKAQNQQT

SEQ ID NO: 905 - protein, 14 aa, synthetic construct
GSGSPHRKAQNQQT

SEQ ID NO: 906 - protein, 14 aa, synthetic construct
GRGSPHSKAQNQQT

SEQ ID NO: 907 - protein, 14 aa, synthetic construct
GSGSPHSKAQNKQT

SEQ ID NO: 908 - protein, 14 aa, synthetic construct
GSGSPHSKAQTQQT

SEQ ID NO: 909 - protein, 14 aa, synthetic construct
GSGSTHASRQNQQT

SEQ ID NO: 910 - protein, 14 aa, synthetic construct
GSGSPHKYGQNQQT

SEQ ID NO: 911 - protein, 14 aa, synthetic construct
GSGSPHKFGQNQQT

SEQ ID NO: 912 - protein, 14 aa, synthetic construct
VSGSPHKFGQNQQT

SEQ ID NO: 913 - protein, 14 aa, synthetic construct
GSGSPHSKAQNHQT

SEQ ID NO: 914 - protein, 14 aa, synthetic construct
GSGSPHSKAQHQQT

SEQ ID NO: 915 - protein, 14 aa, synthetic construct
GSGSPHKTYQNQQT

SEQ ID NO: 916 - protein, 14 aa, synthetic construct
VSGSPHASRQNQQT

SEQ ID NO: 917 - protein, 14 aa, synthetic construct
GSGSPHKFGKNQQT

SEQ ID NO: 918 - protein, 14 aa, synthetic construct
GSGSPHASRQNQHT

SEQ ID NO: 919 - protein, 14 aa, synthetic construct
GSHSPHKSGQNQQT

SEQ ID NO: 920 - protein, 14 aa, synthetic construct
GSGQNQQRRMSPST

SEQ ID NO: 921 - protein, 14 aa, synthetic construct
GSGSPHSKPQNQQT

SEQ ID NO: 922 - protein, 14 aa, synthetic construct
GSGSPHKFGQKQQT

SEQ ID NO: 923 - protein, 14 aa, synthetic construct
VSGSPHGARQNQQT

SEQ ID NO: 924 - protein, 14 aa, synthetic construct
GSGSPHSKAQKQQT

SEQ ID NO: 925 - protein, 14 aa, synthetic construct
GSHSPHKRGQNQQT

SEQ ID NO: 926 - protein, 14 aa, synthetic construct
GSGQNRQRLKGLET

SEQ ID NO: 927 - protein, 14 aa, synthetic construct
GSGSPHKLGQNQQT

SEQ ID NO: 928 - protein, 14 aa, synthetic construct
GSGSPHKTSKNQQT

SEQ ID NO: 929 - protein, 14 aa, synthetic construct
GSGSPHKIGQNQQT

SEQ ID NO: 930 - protein, 14 aa, synthetic construct
GSGQDSPHVRNQQT

SEQ ID NO: 931 - protein, 14 aa, synthetic construct
GSGSPHKTSQNQQT

SEQ ID NO: 932 - protein, 14 aa, synthetic construct
GSGSPHASRKNQQT

SEQ ID NO: 933 - protein, 14 aa, synthetic construct
GSHSPHKSGQKQQT

SEQ ID NO: 934 - protein, 14 aa, synthetic construct
GSGSPHKTSQKQQT

SEQ ID NO: 935 - protein, 14 aa, synthetic construct
GSGSPHVRGQNKQT

SEQ ID NO: 936 - protein, 14 aa, synthetic construct
GSGSPHKTTQNQQT

SEQ ID NO: 937 - protein, 14 aa, synthetic construct
GSGPVRALRQNQQT

SEQ ID NO: 938 - protein, 14 aa, synthetic construct
GSGSPHVRGQKQQT

SEQ ID NO: 939 - protein, 14 aa, synthetic construct
CSGSPHKTSQNQQT

SEQ ID NO: 940 - protein, 14 aa, synthetic construct
CSHSPHKSGQNQQT

SEQ ID NO: 941 - protein, 6 aa, synthetic construct
SPHSKA

SEQ ID NO: 942 - DNA, 18 bp, synthetic construct
  source 1..18: mol_type = other DNA
agcccacacagcaaagca

SEQ ID NO: 943 - protein, 8 aa, synthetic construct
HDSPHKSG

SEQ ID NO: 944 - DNA, 24 bp, synthetic construct
  source 1..24: mol_type = other DNA
cacgacagcccacacaaaagcgga

SEQ ID NO: 945 - protein, 6 aa, synthetic construct
SPHSKA

SEQ ID NO: 946 - protein, 6 aa, synthetic construct
SPHKSG

SEQ ID NO: 947 - protein, 6 aa, synthetic construct
SPHARM

SEQ ID NO: 948 - protein, 6 aa, synthetic construct
SPHVKS

SEQ ID NO: 949 - protein, 6 aa, synthetic construct
SPHASR

SEQ ID NO: 950 - protein, 6 aa, synthetic construct
SPHVKI

SEQ ID NO: 951 - protein, 6 aa, synthetic construct
SPHKSR

SEQ ID NO: 952 - protein, 6 aa, synthetic construct
SPHSLR

SEQ ID NO: 953 - protein, 6 aa, synthetic construct
SPHSKW

SEQ ID NO: 954 - protein, 6 aa, synthetic construct
SPHKKN

SEQ ID NO: 955 - protein, 6 aa, synthetic construct
SPHVRM

SEQ ID NO: 956 - protein, 6 aa, synthetic construct
SPHRKA

SEQ ID NO: 957 - protein, 6 aa, synthetic construct
SPHKFG

SEQ ID NO: 958 - protein, 6 aa, synthetic construct
SPHKIG

SEQ ID NO: 959 - protein, 6 aa, synthetic construct
SPHKLG

SEQ ID NO: 960 - protein, 6 aa, synthetic construct
SPHSKL

SEQ ID NO: 961 - protein, 6 aa, synthetic construct
SPHSRG

SEQ ID NO: 962 - protein, 6 aa, synthetic construct
SPHSKS

SEQ ID NO: 963 - protein, 6 aa, synthetic construct
SPHKTS

SEQ ID NO: 964 - protein, 6 aa, synthetic construct
SPHKTT

SEQ ID NO: 965 - protein, 6 aa, synthetic construct
SPHKTY

SEQ ID NO: 966 - protein, 6 aa, synthetic construct
SPHKYG

SEQ ID NO: 967 - protein, 6 aa, synthetic construct
SPHSKD

SEQ ID NO: 968 - protein, 6 aa, synthetic construct
SPHSKP

SEQ ID NO: 969 - protein, 6 aa, synthetic construct
SPHSRA

SEQ ID NO: 970 - protein, 6 aa, synthetic construct
SPHSSR

SEQ ID NO: 971 - protein, 6 aa, synthetic construct
SPHWKA

SEQ ID NO: 972 - protein, 6 aa, synthetic construct
SPHTRG

SEQ ID NO: 973 - protein, 6 aa, synthetic construct
SPHVRG

SEQ ID NO: 974 - protein, 6 aa, synthetic construct
SPHKRG

SEQ ID NO: 975 - protein, 6 aa, synthetic construct
SPHGAR

SEQ ID NO: 976 - protein, 6 aa, synthetic construct
SPHRSG

SEQ ID NO: 977 - protein, 6 aa, synthetic construct
SPHKSA

SEQ ID NO: 978 - protein, 6 aa, synthetic construct
SPHSKR

SEQ ID NO: 979 - protein, 6 aa, synthetic construct
SPHFLR

SEQ ID NO: 980 - protein, 6 aa, synthetic construct
SPHVRR

SEQ ID NO: 981 - protein, 742 aa, synthetic construct
MAADGYLPDWLEDNLSEGIREWWALKPGAPQPKANQQHQDNARGLVLPGYKYLGPGNGLDKGEPVNAADAAALEHDKAYDQQLKAGDNPYLKYNHADAEFQERLKEDTSFGGNLGRAVFQAKKRLLEPLGLVEEAAKTAPGKKRPVEQSPQEPDSSAGIGKSGAQPAKKRLNFGQTGDTESVPDPQPIGEPPAAPSGVGSLTMASGGGAPVADNNEGADGVGSSSGNWHCDSQWLGDRVITTSTRTWALPTYNNHLYKQISNSTSGGSSNDNAYFGYSTPWGYFDFNRFHCHFSPRDWQRLINNNWGFRPKRLNFKLFNIQVKEVTDNNGVKTIANNLTSTVQVFTDSDYQLPYVLGSAHEGCLPPFPADVFMIPQYGYLTLNDGSQAVGRSSFYCLEYFPSQMLRTGNNFQFSYEFENVPFHSSYAHSQSLDRLMNPLIDQYLYYLSKTINGSGSPHSKAQNQQTLKFSVAGPSNMAVQGRNYIPGPSYRQQRVSTTVTQNNNSEFAWPGASSWALNGRNSLMNPGPAMASHKEGEDRFFPLSGSLIFGKQGTGRDNVDADKVMITNEEEIKTTNPVATESYGQVATNHQSAQAQAQTGWVQNQGILPGMVWQDRDVYLQGPIWAKIPHTDGNFHPSPLMGGFGMKHPPPQILIKNTPVPADPPTAFNKDKLNSFITQYSTGQVSVEIEWELQKENSKRWNPEIQYTSNYYKSNNVEFAVNTEGVYSEPRPIGTRYLTRNL

SEQ ID NO: 982 - protein, 742 aa, synthetic construct
MAADGYLPDWLEDNLSEGIREWWALKPGAPQPKANQQHQDNARGLVLPGYKYLGPGNGLDKGEPVNAADAAALEHDKAYDQQLKAGDNPYLKYNHADAEFQERLKEDTSFGGNLGRAVFQAKKRLLEPLGLVEEAAKTAPGKKRPVEQSPQEPDSSAGIGKSGAQPAKKRLNFGQTGDTESVPDPQPIGEPPAAPSGVGSLTMASGGGAPVADNNEGADGVGSSSGNWHCDSQWLGDRVITTSTRTWALPTYNNHLYKQISNSTSGGSSNDNAYFGYSTPWGYFDFNRFHCHFSPRDWQRLINNNWGFRPKRLNFKLFNIQVKEVTDNNGVKTIANNLTSTVQVFTDSDYQLPYVLGSAHEGCLPPFPADVFMIPQYGYLTLNDGSQAVGRSSFYCLEYFPSQMLRTGNNFQFSYEFENVPFHSSYAHSQSLDRLMNPLIDQYLYYLSKTINGHDSPHKSGQNQQTLKFSVAGPSNMAVQGRNYIPGPSYRQQRVSTTVTQNNNSEFAWPGASSWALNGRNSLMNPGPAMASHKEGEDRFFPLSGSLIFGKQGTGRDNVDADKVMITNEEEIKTTNPVATESYGQVATNHQSAQAQAQTGWVQNQGILPGMVWQDRDVYLQGPIWAKIPHTDGNFHPSPLMGGFGMKHPPPQILIKNTPVPADPPTAFNKDKLNSFITQYSTGQVSVEIEWELQKENSKRWNPEIQYTSNYYKSNNVEFAVNTEGVYSEPRPIGTRYLTRNL

SEQ ID NO: 983 - DNA, 2229 bp, synthetic construct
  source 1..2229: mol_type = other DNA
atggctgccgatggttatcttccagattggctcgaggacaaccttagtgaaggaattcgcgagtggtgggctttgaaacctggagcccctcaacccaaggcaaatcaacaacatcaagacaacgctcgaggtcttgtgcttccgggttacaaataccttggacccggcaacggactcgacaagggggagccggtcaacgcagcagacgcggcggccctcgagcacgacaaggcctacgaccagcagctcaaggccggagacaacccgtacctcaagtacaaccacgccgacgccgagttccaggagcggctcaaagaagatacgtcttttgggggcaacctcgggcgagcagtcttccaggccaaaaagaggcttcttgaacctcttggtctggttgaggaagcggctaagacggctcctggaaagaagaggcctgtagagcagtctcctcaggaaccggactcctccgcgggtattggcaaatcgggtgcacagcccgctaaaaagagactcaatttcggtcagactggcgacacagagtcagtcccagaccctcaaccaatcggagaacctcccgcagccccctcaggtgtgggatctcttacaatggcttcaggtggtggcgcaccagtggcagacaataacgaaggtgccgatggagtgggtagttcctcgggaaattggcattgcgattcccaatggctgggggacagagtcatcaccaccagcacccgaacctgggccctgcccacctacaacaatcacctctacaagcaaatctccaacagcacatctggaggatcttcaaatgacaacgcctacttcggctacagcaccccctgggggtattttgacttcaacagattccactgccacttctcaccacgtgactggcagcgactcatcaacaacaactggggattccggcctaagcgactcaacttcaagctcttcaacattcaggtcaaagaggttacggacaacaatggagtcaagaccatcgccaataaccttaccagcacggtccaggtcttcacggactcagactatcagctcccgtacgtgctcgggtcggctcacgagggctgcctcccgccgttcccagcggacgttttcatgattcctcagtacgggtatctgacgcttaatgatggaagccaggccgtgggtcgttcgtccttttactgcctggaatatttcccgtcgcaaatgctaagaacgggtaacaacttccagttcagctacgagtttgagaacgtacctttccatagcagctacgctcacagccaaagcctggaccgactaatgaatccactcatcgaccaatacttgtattacttgagtaaaacaattaacggaagcggaagcccacacagcaaagcacaaaaccaacagaccttgaagttttcggtagctggtcctagcaacatggctgtccagggaagaaactacatacctggacccagctaccgacaacaacgtgtctcaaccactgtgactcaaaacaacaacagcgaatttgcttggcctggagcttcttcttgggctctcaatggacgtaatagcttgatgaatcctggacctgctatggccagccacaaagaaggagaggaccgtttctttcctttgtctggatctttaatttttggcaaacaaggaactggaagagacaacgtggatgcggacaaagtcatgataaccaacgaagaagaaattaaaactactaacccggtagcaacggagtcctatggacaagtggccacaaaccaccagagtgcccaagcacaggcgcagaccggctgggttcaaaaccaaggaatacttccgggtatggtttggcaggacagagatgtgtacctgcaaggacccatttgggccaaaattcctcacacggacggcaactttcacccttctccgctgatgggagggtttggaatgaagcacccgcctcctcagatcctcatcaaaaacacacctgtacctgcggatcctccaacggccttcaacaaggacaagctgaactctttcatcacccagtattctactggccaagtcagcgtggagatcgagtgggagctgcagaaggaaaacagcaagcgctggaacccggagatccagtacacttccaactattacaagtctaataatgttgaatttgctgttaatactgaaggtgtatatagtgaaccccgccccattggcacgcggtatttaacgaggaacttataa

SEQ ID NO: 984 - DNA, 2229 bp, synthetic construct
  source 1..2229: mol_type = other DNA
atggctgccgatggttatcttccagattggctcgaggacaaccttagtgaaggaattcgcgagtggtgggctttgaaacctggagcccctcaacccaaggcaaatcaacaacatcaagacaacgctcgaggtcttgtgcttccgggttacaaataccttggacccggcaacggactcgacaagggggagccggtcaacgcagcagacgcggcggccctcgagcacgacaaggcctacgaccagcagctcaaggccggagacaacccgtacctcaagtacaaccacgccgacgccgagttccaggagcggctcaaagaagatacgtcttttgggggcaacctcgggcgagcagtcttccaggccaaaaagaggcttcttgaacctcttggtctggttgaggaagcggctaagacggctcctggaaagaagaggcctgtagagcagtctcctcaggaaccggactcctccgcgggtattggcaaatcgggtgcacagcccgctaaaaagagactcaatttcggtcagactggcgacacagagtcagtcccagaccctcaaccaatcggagaacctcccgcagccccctcaggtgtgggatctcttacaatggcttcaggtggtggcgcaccagtggcagacaataacgaaggtgccgatggagtgggtagttcctcgggaaattggcattgcgattcccaatggctgggggacagagtcatcaccaccagcacccgaacctgggccctgcccacctacaacaatcacctctacaagcaaatctccaacagcacatctggaggatcttcaaatgacaacgcctacttcggctacagcaccccctgggggtattttgacttcaacagattccactgccacttctcaccacgtgactggcagcgactcatcaacaacaactggggattccggcctaagcgactcaacttcaagctcttcaacattcaggtcaaagaggttacggacaacaatggagtcaagaccatcgccaataaccttaccagcacggtccaggtcttcacggactcagactatcagctcccgtacgtgctcgggtcggctcacgagggctgcctcccgccgttcccagcggacgttttcatgattcctcagtacgggtatctgacgcttaatgatggaagccaggccgtgggtcgttcgtccttttactgcctggaatatttcccgtcgcaaatgctaagaacgggtaacaacttccagttcagctacgagtttgagaacgtacctttccatagcagctacgctcacagccaaagcctggaccgactaatgaatccactcatcgaccaatacttgtattacttgagtaaaacaattaacggacacgacagcccacacaaaagcggacaaaaccaacagaccttgaagttttcggtagctggtcctagcaacatggctgtccagggaagaaactacatacctggacccagctaccgacaacaacgtgtctcaaccactgtgactcaaaacaacaacagcgaatttgcttggcctggagcttcttcttgggctctcaatggacgtaatagcttgatgaatcctggacctgctatggccagccacaaagaaggagaggaccgtttctttcctttgtctggatctttaatttttggcaaacaaggaactggaagagacaacgtggatgcggacaaagtcatgataaccaacgaagaagaaattaaaactactaacccggtagcaacggagtcctatggacaagtggccacaaaccaccagagtgcccaagcacaggcgcagaccggctgggttcaaaaccaaggaatacttccgggtatggtttggcaggacagagatgtgtacctgcaaggacccatttgggccaaaattcctcacacggacggcaactttcacccttctccgctgatgggagggtttggaatgaagcacccgcctcctcagatcctcatcaaaaacacacctgtacctgcggatcctccaacggccttcaacaaggacaagctgaactctttcatcacccagtattctactggccaagtcagcgtggagatcgagtgggagctgcagaaggaaaacagcaagcgctggaacccggagatccagtacacttccaactattacaagtctaataatgttgaatttgctgttaatactgaaggtgtatatagtgaaccccgccccattggcacgcggtatttaacgaggaacttataa

SEQ ID NO: 985 - protein, 6 aa, synthetic construct
STHASR

SEQ ID NO: 986 - protein, 6 aa, synthetic construct
SQHKSG

SEQ ID NO: 987 - DNA, 1184 bp, synthetic construct
  source 1..1184: mol_type = other DNA
cgtgaggctccggtgcccgtcagtgggcagagcgcacatcgcccacagtccccgagaagttggggggaggggtcggcaattgaaccggtgcctagagaaggtggcgcggggtaaactgggaaagtgatgtcgtgtactggctccgcctttttcccgagggtgggggagaaccgtatataagtgcagtagtcgccgtgaacgttctttttcgcaacgggtttgccgccagaacacaggtaagtgccgtgtgtggttcccgcgggcctggcctctttacgggttatggcccttgcgtgccttgaattacttccacctggctgcagtacgtgattcttgatcccgagcttcgggttggaagtgggtgggagagttcgaggccttgcgcttaaggagccccttcgcctcgtgcttgagttgaggcctggcctgggcgctggggccgccgcgtgcgaatctggtggcaccttcgcgcctgtctcgctgctttcgataagtctctagccatttaaaatttttgatgacctgctgcgacgctttttttctggcaagatagtcttgtaaatgcgggccaagatctgcacactggtatttcggtttttggggccgcgggcggcgacggggcccgtgcgtcccagcgcacatgttcggcgaggcggggcctgcgagcgcggccaccgagaatcggacgggggtagtctcaagctggccggcctgctctggtgcctggcctcgcgccgccgtgtatcgccccgccctgggcggcaaggctggcccggtcggcaccagttgcgtgagcggaaagatggccgcttcccggccctgctgcagggagctcaaaatggaggacgcggcgctcgggagagcgggcgggtgagtcacccacacaaaggaaaagggcctttccgtcctcagccgtcgcttcatgtgactccacggagtaccgggcgccgtccaggcacctcgattagttctcgagcttttggagtacgtcgtctttaggttggggggaggggttttatgcgatggagtttccccacactgagtgggtggagactgaagttaggccagcttggcacttgatgtaattctccttggaatttgccctttttgagtttggatcttggttcattctcaagcctcagacagtggttcaaagtttttttcttccatttcaggtgtcgtga

SEQ ID NO: 988 - DNA, 227 bp, synthetic construct
  source 1..227: mol_type = other DNA
gcccgtcagtgggcagagcgcacatcgcccacagtccccgagaagttggggggaggggtcggcaattgaaccggtgcctagagaaggtggcgcggggtaaactgggaaagtgatgtcgtgtactggctccgcctttttcccgagggtgggggagaaccgtatataagtgcagtagtcgccgtgaacgttctttttcgcaacgggtttgccgccagaacacgcgtaag

SEQ ID NO: 989 - skipped

SEQ ID NO: 990 - DNA, 16 bp, synthetic construct
  source 1..16: mol_type = other DNA
ggtggagaagagcatg

SEQ ID NO: 991 - DNA, 27 bp, synthetic construct
  source 1..27: mol_type = other DNA
gtcatcactgaggtggagaagagcatg

SEQ ID NO: 992-994 - skipped (3 entries)

SEQ ID NO: 995 - DNA, 222 bp, synthetic construct
  source 1..222: mol_type = other DNA
gcccgtcagtgggcagagcgcacatcgcccacagtccccgagaagttggggggaggggtcggcaattgaaccggtgcctagagaaggtggcgcggggtaaactgggaaagtgatgtcgtgtactggctccgcctttttcccgagggtgggggagaaccgtatataagtgcagtagtcgccgtgaacgttctttttcgcaacgggtttgccgccagaacacag

SEQ ID NO: 996 - DNA, 222 bp, synthetic construct
  source 1..222: mol_type = other DNA
gcccgtcagtgggcagagcgcacatcgcccacagtccccgagaagttggggggaggggtcggcaattgaaccggtgcctagagaaggtggcgcggggtaaactgggaaagtgatgtcgtgtactggctccgcctttttcccgagggtgggggagaaccgtatataagtgcagtagtcgccgtgaacgttctttttcgcaacgggtttgccgccagaacacgc

SEQ ID NO: 997 - skipped

SEQ ID NO: 998 - DNA, 229 bp, synthetic construct
  source 1..229: mol_type = other DNA
gtgcccgtcagtgggcagagcgcacatcgcccacagtccccgagaagttggggggaggggtcggcaattgaaccggtgcctagagaaggtggcgcggggtaaactgggaaagtgatgtcgtgtactggctccgcctttttcccgagggtgggggagaaccgtatataagtgcagtagtcgccgtgaacgttctttttcgcaacgggtttgccgccagaacacgcgtaag

SEQ ID NO: 999 - DNA, 235 bp, synthetic construct
  source 1..235: mol_type = other DNA
gctccggtgcccgtcagtgggcagagcgcacatcgcccacagtccccgagaagttggggggaggggtcggcaattgaaccggtgcctagagaaggtggcgcggggtaaactgggaaagtgatgtcgtgtactggctccgcctttttcccgagggtgggggagaaccgtatataagtgcagtagtcgccgtgaacgttctttttcgcaacgggtttgccgccagaacacgcgtaag

SEQ ID NO: 1000 - DNA, 241 bp, synthetic construct
  source 1..241: mol_type = other DNA
cgtgaggctccggtgcccgtcagtgggcagagcgcacatcgcccacagtccccgagaagttggggggaggggtcggcaattgaaccggtgcctagagaaggtggcgcggggtaaactgggaaagtgatgtcgtgtactggctccgcctttttcccgagggtgggggagaaccgtatataagtgcagtagtcgccgtgaacgttctttttcgcaacgggtttgccgccagaacacgcgtaag

SEQ ID NO: 1001 - DNA, 236 bp, synthetic construct
  source 1..236: mol_type = other DNA
cgtgaggctccggtgcccgtcagtgggcagagcgcacatcgcccacagtccccgagaagttggggggaggggtcggcaattgaaccggtgcctagagaaggtggcgcggggtaaactgggaaagtgatgtcgtgtactggctccgcctttttcccgagggtgggggagaaccgtatataagtgcagtagtcgccgtgaacgttctttttcgcaacgggtttgccgccagaacacag

SEQ ID NO: 1002 - DNA, 246 bp, synthetic construct
  source 1..246: mol_type = other DNA
gcatgcgtgaggctccggtgcccgtcagtgggcagagcgcacatcgcccacagtccccgagaagttggggggaggggtcggcaattgaaccggtgcctagagaaggtggcgcggggtaaactgggaaagtgatgtcgtgtactggctccgcctttttcccgagggtgggggagaaccgtatataagtgcagtagtcgccgtgaacgttctttttcgcaacgggtttgccgccagaacacgcgtaag

SEQ ID NO: 1003 - DNA, 241 bp, synthetic construct
  source 1..241: mol_type = other DNA
gcatgcgtgaggctccggtgcccgtcagtgggcagagcgcacatcgcccacagtccccgagaagttggggggaggggtcggcaattgaaccggtgcctagagaaggtggcgcggggtaaactgggaaagtgatgtcgtgtactggctccgcctttttcccgagggtgggggagaaccgtatataagtgcagtagtcgccgtgaacgttctttttcgcaacgggtttgccgccagaacacag

SEQ ID NO: 1004 - DNA, 257 bp, synthetic construct
  source 1..257: mol_type = other DNA
ggtggagaagagcatgcgtgaggctccggtgcccgtcagtgggcagagcgcacatcgcccacagtccccgagaagttggggggaggggtcggcaattgaaccggtgcctagagaaggtggcgcggggtaaactgggaaagtgatgtcgtgtactggctccgcctttttcccgagggtgggggagaaccgtatataagtgcagtagtcgccgtgaacgttctttttcgcaacgggtttgccgccagaacacgcgtaag

SEQ ID NO: 1005 - DNA, 252 bp, synthetic construct
  source 1..252: mol_type = other DNA
ggtggagaagagcatgcgtgaggctccggtgcccgtcagtgggcagagcgcacatcgcccacagtccccgagaagttggggggaggggtcggcaattgaaccggtgcctagagaaggtggcgcggggtaaactgggaaagtgatgtcgtgtactggctccgcctttttcccgagggtgggggagaaccgtatataagtgcagtagtcgccgtgaacgttctttttcgcaacgggtttgccgccagaacacag

SEQ ID NO: 1006 - DNA, 268 bp, synthetic construct
  source 1..268: mol_type = other DNA
gtcatcactgaggtggagaagagcatgcgtgaggctccggtgcccgtcagtgggcagagcgcacatcgcccacagtccccgagaagttggggggaggggtcggcaattgaaccggtgcctagagaaggtggcgcggggtaaactgggaaagtgatgtcgtgtactggctccgcctttttcccgagggtgggggagaaccgtatataagtgcagtagtcgccgtgaacgttctttttcgcaacgggtttgccgccagaacacgcgtaag

SEQ ID NO: 1007 - DNA, 263 bp, synthetic construct
  source 1..263: mol_type = other DNA
gtcatcactgaggtggagaagagcatgcgtgaggctccggtgcccgtcagtgggcagagcgcacatcgcccacagtccccgagaagttggggggaggggtcggcaattgaaccggtgcctagagaaggtggcgcggggtaaactgggaaagtgatgtcgtgtactggctccgcctttttcccgagggtgggggagaaccgtatataagtgcagtagtcgccgtgaacgttctttttcgcaacgggtttgccgccagaacacag

SEQ ID NO: 1008 - protein, 18 aa, synthetic construct
KTINGSGSPHSLLWNQQT

SEQ ID NO: 1009 - protein, 18 aa, synthetic construct
KTINGSGSPHSKAQYYVT

SEQ ID NO: 1010 - protein, 18 aa, synthetic construct
KTINGSGSPHSKLRRQQT

SEQ ID NO: 1011 - protein, 18 aa, synthetic construct
KTINGSGSPHSIWQNQQT

SEQ ID NO: 1012 - protein, 18 aa, synthetic construct
KTINGSSSPHCTAQNQQT

SEQ ID NO: 1013 - protein, 18 aa, synthetic construct
KTINGSGSPHSKAGCGQT

SEQ ID NO: 1014 - protein, 18 aa, synthetic construct
KSMNGSGSPHSRAQNQQT

SEQ ID NO: 1015 - protein, 18 aa, synthetic construct
KTINGSGSPHSKRLRQQT

SEQ ID NO: 1016 - protein, 18 aa, synthetic construct
KTINGSGSPHSLRRNQQT

SEQ ID NO: 1017 - protein, 18 aa, synthetic construct
KTINGSGSPHSRGRNQQT

SEQ ID NO: 1018 - protein, 18 aa, synthetic construct
KTINGSGSPHSEIVNQQT

SEQ ID NO: 1019 - protein, 18 aa, synthetic construct
KTINGSGSPHSSRRNQQT

SEQ ID NO: 1020 - protein, 18 aa, synthetic construct
KTINGSGSPHCLLQNQQT

SEQ ID NO: 1021 - protein, 18 aa, synthetic construct
KTIMRVGSPHSKAQNQQT

SEQ ID NO: 1022 - protein, 18 aa, synthetic construct
KTINGSGSPHSKAFRLQT

SEQ ID NO: 1023 - protein, 18 aa, synthetic construct
KTINGSGSPHCLAQNQQT

SEQ ID NO: 1024 - protein, 18 aa, synthetic construct
KTINGSCSPHRKAQNQQT

SEQ ID NO: 1025 - protein, 18 aa, synthetic construct
KTINGSGSPHFLRQNQQT

SEQ ID NO: 1026 - protein, 18 aa, synthetic construct
KTINGSGSPHSLRFNQQT

SEQ ID NO: 1027 - protein, 18 aa, synthetic construct
KTINGSGSPHSYLRNQQT

SEQ ID NO: 1028 - protein, 18 aa, synthetic construct
KTINGSGSPHCSLQNQQT

SEQ ID NO: 1029 - protein, 18 aa, synthetic construct
KTINGSGSPHVLWQNQQT

SEQ ID NO: 1030 - protein, 18 aa, synthetic construct
KTINGSGSPHSKWLLQQT

SEQ ID NO: 1031 - protein, 18 aa, synthetic construct
KTINGSGSPHSLWSNQQT

SEQ ID NO: 1032 - protein, 18 aa, synthetic construct
KTINGSGSPHSKRRLQQT

SEQ ID NO: 1033 - protein, 18 aa, synthetic construct
KTINGSGSPHSVYLNQQT

SEQ ID NO: 1034 - protein, 18 aa, synthetic construct
KTINGSGSPHSLWLNQQT

SEQ ID NO: 1035 - protein, 18 aa, synthetic construct
KTINGSGSPHSKAQRKLT

SEQ ID NO: 1036 - protein, 18 aa, synthetic construct
KTINGSGSPHSKALRRQT

SEQ ID NO: 1037 - protein, 18 aa, synthetic construct
KTINGSGSPHSKAQRLRT

SEQ ID NO: 1038 - protein, 18 aa, synthetic construct
KYLSGSGSPHSKAQNQQT

SEQ ID NO: 1039 - protein, 18 aa, synthetic construct
KTINGSGSPHSKAQRRLT

SEQ ID NO: 1040 - protein, 18 aa, synthetic construct
KTINGSGSPHSKARRQQT

SEQ ID NO: 1041 - protein, 18 aa, synthetic construct
KTINGSGSPHSKARRLQT

SEQ ID NO: 1042 - protein, 18 aa, synthetic construct
KTINGSGSPHSKSRRQQT

SEQ ID NO: 1043 - protein, 18 aa, synthetic construct
KTINGLLSPHWKAQNQQT

SEQ ID NO: 1044 - protein, 18 aa, synthetic construct
KTINGSGSPHSKARLRQT

SEQ ID NO: 1045 - protein, 18 aa, synthetic construct
KTINGSGSPHSKASKRQT

SEQ ID NO: 1046 - protein, 18 aa, synthetic construct
KTINGSGSPHVRRQNQQT

SEQ ID NO: 1047 - protein, 18 aa, synthetic construct
KTINGSGSPHSKAQLYRT

SEQ ID NO: 1048 - protein, 18 aa, synthetic construct
KGLSGSGSPHSKAQNQQT

SEQ ID NO: 1049 - protein, 18 aa, synthetic construct
KTINGSGSPHSLFRNQQT

SEQ ID NO: 1050 - protein, 18 aa, synthetic construct
KTINGSGSPHSKAQLTVT

SEQ ID NO: 1051 - protein, 18 aa, synthetic construct
KTINGSRSPHTRAQNQQT

SEQ ID NO: 1052 - protein, 18 aa, synthetic construct
KTINGSGSPHSKAKLRQT

SEQ ID NO: 1053 - protein, 18 aa, synthetic construct
KTINGSGSPHSKLIRQQT

SEQ ID NO: 1054 - protein, 18 aa, synthetic construct
KTINGSGSPHSKALRFQT

SEQ ID NO: 1055 - protein, 18 aa, synthetic construct
KTINGSGSPHSKRTFQQT

SEQ ID NO: 1056 - protein, 18 aa, synthetic construct
KTINGSGSPHSKAQKRLT

SEQ ID NO: 1057 - protein, 18 aa, synthetic construct
KTINGSGSPHLWSQNQQT

SEQ ID NO: 1058 - protein, 18 aa, synthetic construct
KTINGSGSPHLLWQNQQT

SEQ ID NO: 1059 - protein, 18 aa, synthetic construct
KTINGSGSPHSRLRNQQT

SEQ ID NO: 1060 - protein, 18 aa, synthetic construct
KTINGSGSPHSKRAAQQT

SEQ ID NO: 1061 - protein, 18 aa, synthetic construct
KTINGSGSPHSKRSWQQT

SEQ ID NO: 1062 - protein, 18 aa, synthetic construct
KTINGSGSPHSKAQLRRT

SEQ ID NO: 1063 - protein, 18 aa, synthetic construct
KTINGSGSPHYLVQNQQT

SEQ ID NO: 1064 - protein, 18 aa, synthetic construct
KTINGSGSPHSKLFRQQT

SEQ ID NO: 1065 - protein, 18 aa, synthetic construct
KTINGSGSPHSKRAMQQT

SEQ ID NO: 1066 - protein, 18 aa, synthetic construct
KTINGSGSPHSKTLRQQT

SEQ ID NO: 1067 - protein, 18 aa, synthetic construct
KTINGSGSPHSRSRNQQT

SEQ ID NO: 1068 - protein, 18 aa, synthetic construct
KTINGSGSPHRRRQNQQT

SEQ ID NO: 1069 - protein, 18 aa, synthetic construct
KTINGSGSPHSKTCLQQT

SEQ ID NO: 1070 - protein, 18 aa, synthetic construct
KTINGSGSPHSKSRWQQT

SEQ ID NO: 1071 - protein, 18 aa, synthetic construct
KTINGSGSPHRFRQNQQT

SEQ ID NO: 1072 - protein, 18 aa, synthetic construct
KTINGLRSPHRKAQNQQT

SEQ ID NO: 1073 - protein, 18 aa, synthetic construct
KTRSRSGSPHSKAQNQQT

SEQ ID NO: 1074 - protein, 18 aa, synthetic construct
KTINGSGSPHSKAQLVVT

SEQ ID NO: 1075 - protein, 18 aa, synthetic construct
KTINGSGSPHSRKLNQQT

SEQ ID NO: 1076 - protein, 18 aa, synthetic construct
KTINGSGSPHSLLCNQQT

SEQ ID NO: 1077 - protein, 18 aa, synthetic construct
KTINGKRSPHSKAQNQQT

SEQ ID NO: 1078 - protein, 18 aa, synthetic construct
KTINGSRSPHLFAQNQQT

SEQ ID NO: 1079 - protein, 18 aa, synthetic construct
KSINGSGSPHSKAHDQQT

SEQ ID NO: 1080 - protein, 18 aa, synthetic construct
KTINGSGSPHSKAQRSRT

SEQ ID NO: 1081 - protein, 18 aa, synthetic construct
KTINGSGSPHSTWLNQQT

SEQ ID NO: 1082 - protein, 18 aa, synthetic construct
KTINGSGSPHSKASRRQT

SEQ ID NO: 1083 - protein, 18 aa, synthetic construct
KTINGSGSPHSKRSMQQT

SEQ ID NO: 1084 - protein, 18 aa, synthetic construct
KTINGSGSPHSCLQNQQT

SEQ ID NO: 1085 - protein, 18 aa, synthetic construct
KTINGSGSPHSKRLWQQT

SEQ ID NO: 1086 - protein, 18 aa, synthetic construct
KTINGSGSPHSWLSNQQT

SEQ ID NO: 1087 - protein, 18 aa, synthetic construct
KTINGSGSPHLRRQNQQT

SEQ ID NO: 1088 - protein, 18 aa, synthetic construct
KTINGSGSPHSKARRSQT

SEQ ID NO: 1089 - protein, 18 aa, synthetic construct
KTINGSGSPHSKHLRQQT

SEQ ID NO: 1090 - protein, 18 aa, synthetic construct
KTINGSGSPHSCSQNQQT

SEQ ID NO: 1091 - protein, 18 aa, synthetic construct
KTINGSGSPHSKSFRQQT

SEQ ID NO: 1092 - protein, 18 aa, synthetic construct
KTINGSGSPHLCLQNQQT

SEQ ID NO: 1093 - protein, 18 aa, synthetic construct
KTINGSGSPHSKAQTSRT

SEQ ID NO: 1094 - protein, 18 aa, synthetic construct
KTINGSGSPHSLCSNQQT

SEQ ID NO: 1095 - protein, 18 aa, synthetic construct
KTINGSRSPHLRAQNQQT

SEQ ID NO: 1096 - protein, 18 aa, synthetic construct
KTINGSGSPHSKAQVSKT

SEQ ID NO: 1097 - protein, 18 aa, synthetic construct
KTINGSGSPHSKAQRHVT

SEQ ID NO: 1098 - protein, 18 aa, synthetic construct
KTINGSSSPHLCAQNQQT

SEQ ID NO: 1099 - protein, 18 aa, synthetic construct
KTINGSGSPHSFLRNQQT

SEQ ID NO: 1100 - protein, 18 aa, synthetic construct
KTINGSGSPHSFVLNQQT

SEQ ID NO: 1101 - protein, 18 aa, synthetic construct
KTINGSGSPHSKMRAQQT

SEQ ID NO: 1102 - protein, 18 aa, synthetic construct
KTINGSGSPHRPRQNQQT

SEQ ID NO: 1103 - protein, 18 aa, synthetic construct
KTINGSGSPHSKCLLQQT

SEQ ID NO: 1104 - protein, 18 aa, synthetic construct
KTINGSGSPHSKAQSRRT

SEQ ID NO: 1105 - protein, 18 aa, synthetic construct
KTINGSGSPHSRWQNQQT

SEQ ID NO: 1106 - protein, 18 aa, synthetic construct
KYSVGSGSPHSKAQNQQT

SEQ ID NO: 1107 - protein, 18 aa, synthetic construct
KTINGSGSPHSKRFLQQT

SEQ ID NO: 1108 - protein, 18 aa, synthetic construct
KTINGSGSPHSLFLNQQT

SEQ ID NO: 1109 - protein, 18 aa, synthetic construct
KTINGSGSPHSKAYLRQT

SEQ ID NO: 1110 - protein, 18 aa, synthetic construct
KTINGSGSPHSKRNGQQT

SEQ ID NO: 1111 - protein, 18 aa, synthetic construct
KTINGSGSPHTRRQNQQT

SEQ ID NO: 1112 - protein, 18 aa, synthetic construct
KTINGSGSPHSKPRLQQT

SEQ ID NO: 1113 - protein, 18 aa, synthetic construct
KTINFLRSPHSKAQNQQT

SEQ ID NO: 1114 - protein, 18 aa, synthetic construct
KTINGSGSPHLLCQNQQT

SEQ ID NO: 1115 - protein, 18 aa, synthetic construct
KTINGSGSPHSKARIVQT

SEQ ID NO: 1116 - protein, 18 aa, synthetic construct
KTINGSKSPHFKAQNQQT

SEQ ID NO: 1117 - protein, 18 aa, synthetic construct
KTINGSGSPHSKAQIRLT

SEQ ID NO: 1118 - protein, 18 aa, synthetic construct
KTINGSSSPHWVAQNQQT

SEQ ID NO: 1119 - protein, 18 aa, synthetic construct
KTINGSGSPHSKATRRQT

SEQ ID NO: 1120 - protein, 18 aa, synthetic construct
KTINGSLSPHSCAQNQQT

SEQ ID NO: 1121 - protein, 18 aa, synthetic construct
KTINGSGSPHSLYLNQQT

SEQ ID NO: 1122 - protein, 18 aa, synthetic construct
KTINGSGSPHSKVGRQQT

SEQ ID NO: 1123 - protein, 18 aa, synthetic construct
KTINGSGSPHSRRLNQQT

SEQ ID NO: 1124 - protein, 18 aa, synthetic construct
KTINGSGSPHSKAQHSRT

SEQ ID NO: 1125 - protein, 18 aa, synthetic construct
KTINGSGSPHSKAFPRQT

SEQ ID NO: 1126 - protein, 18 aa, synthetic construct
KTINGSPSPHRRAQNQQT

SEQ ID NO: 1127 - protein, 18 aa, synthetic construct
KTINGSGSPHSKRNLQQT

SEQ ID NO: 1128 - protein, 18 aa, synthetic construct
KTINGSGSPHSKPTRQQT

SEQ ID NO: 1129 - protein, 18 aa, synthetic construct
KTINGSGSPHSKLWLQQT

SEQ ID NO: 1130 - protein, 18 aa, synthetic construct
KTINGSGSPHWLAQNQQT

SEQ ID NO: 1131 - protein, 18 aa, synthetic construct
KTINGSGSPHRTRQNQQT

SEQ ID NO: 1132 - protein, 18 aa, synthetic construct
KTINGSGSPHSKLNKQQT

SEQ ID NO: 1133 - protein, 18 aa, synthetic construct
KTINGSGSPHSSLWNQQT

SEQ ID NO: 1134 - protein, 18 aa, synthetic construct
KTINGSGSPHSKAQITLT

SEQ ID NO: 1135 - protein, 18 aa, synthetic construct
KTINGSGSPHSKFLFQQT

SEQ ID NO: 1136 - protein, 18 aa, synthetic construct
KTINGSGSPHSKRTPQQT

SEQ ID NO: 1137 - protein, 18 aa, synthetic construct
KTINGSGSPHSKAQNSRR

SEQ ID NO: 1138 - protein, 18 aa, synthetic construct
KTINGSGSPHSRLKNQQT

SEQ ID NO: 1139 - protein, 18 aa, synthetic construct
KTINGSGSPHSCLLNQQT

SEQ ID NO: 1140 - protein, 18 aa, synthetic construct
KTINGSGSPHTLYQNQQT

SEQ ID NO: 1141 - protein, 18 aa, synthetic construct
KTINGSGSPHSKYPSQQT

SEQ ID NO: 1142 - protein, 18 aa, synthetic construct
KTINGSGSPHSKLRNQQT

SEQ ID NO: 1143 - protein, 18 aa, synthetic construct
KTINGSGSPHLNWQNQQT

SEQ ID NO: 1144 - protein, 18 aa, synthetic construct
KTINGVVSPHRKAQNQQT

SEQ ID NO: 1145 - protein, 18 aa, synthetic construct
KTINGSGSPHSYRPNQQT

SEQ ID NO: 1146 - protein, 18 aa, synthetic construct
KTINGSTSPHRRAQNQQT

SEQ ID NO: 1147 - protein, 18 aa, synthetic construct
KTINGSCSPHPLAQNQQT

SEQ ID NO: 1148 - protein, 18 aa, synthetic construct
KTINGSGSPHSKAFARQT

SEQ ID NO: 1149 - protein, 18 aa, synthetic construct
KTINGSGSPHSKALRYQT

SEQ ID NO: 1150 - protein, 18 aa, synthetic construct
KTINGSKSPHRLAQNQQT

SEQ ID NO: 1151 - protein, 18 aa, synthetic construct
KTINMRVSPHSKAQNQQT

SEQ ID NO: 1152 - protein, 18 aa, synthetic construct
KTINGSGSPHMYLQNQQT

SEQ ID NO: 1153 - protein, 18 aa, synthetic construct
KTINGSGSPHSKLARQQT

SEQ ID NO: 1154 - protein, 18 aa, synthetic construct
KTINGSGSPHSKARPYQT

SEQ ID NO: 1155 - protein, 18 aa, synthetic construct
KTINGSGSPHSKRVPQQT

SEQ ID NO: 1156 - protein, 18 aa, synthetic construct
KTINGSGSPHLSWQNQQT

SEQ ID NO: 1157 - protein, 18 aa, synthetic construct
KTINGRSSPHGKAQNQQT

SEQ ID NO: 1158 - protein, 18 aa, synthetic construct
KTINGSGSPHLWTQNQQT

SEQ ID NO: 1159 - protein, 18 aa, synthetic construct
KTINGLLSPHRKAQNQQT

SEQ ID NO: 1160 - protein, 18 aa, synthetic construct
KTINGSGSPHRLRQNQQT

SEQ ID NO: 1161 - protein, 18 aa, synthetic construct
KTINGSCSPHSGAQNQQT

SEQ ID NO: 1162 - protein, 18 aa, synthetic construct
KTINGSGSPHSKAQRRST

SEQ ID NO: 1163 - protein, 18 aa, synthetic construct
KTINGSGSPHSKLCSQQT

SEQ ID NO: 1164 - protein, 18 aa, synthetic construct
KTINGSGSPHSKAQLLKT

SEQ ID NO: 1165 - protein, 18 aa, synthetic construct
KTINGRKSPHSKAQNQQT

SEQ ID NO: 1166 - protein, 18 aa, synthetic construct
KTINGSGSPHLLYQNQQT

SEQ ID NO: 1167 - protein, 18 aa, synthetic construct
KTINGSGSPHSKLLRQQT

SEQ ID NO: 1168 - protein, 18 aa, synthetic construct
KTINGSGSPHSLRHNQQT

SEQ ID NO: 1169 - protein, 18 aa, synthetic construct
KTINGSGSPHSSKRNQQT

SEQ ID NO: 1170 - protein, 18 aa, synthetic construct
KTINGSGSPHSKARSRQT

SEQ ID NO: 1171 - protein, 18 aa, synthetic construct
KTINGRSSPHRKAQNQQT

SEQ ID NO: 1172 - protein, 18 aa, synthetic construct
KTINGSKSPHRTAQNQQT

SEQ ID NO: 1173 - protein, 18 aa, synthetic construct
KTINGMRSPHVKAQNQQT

SEQ ID NO: 1174 - protein, 18 aa, synthetic construct
KTINGSGSPHSKRMSQQT

SEQ ID NO: 1175 - protein, 18 aa, synthetic construct
KTINGSGSPHSKVPKQQT

SEQ ID NO: 1176 - protein, 18 aa, synthetic construct
KTINLIRSPHSKAQNQQT

SEQ ID NO: 1177 - protein, 18 aa, synthetic construct
KTINGSGSPHPFLQNQQT

SEQ ID NO: 1178 - protein, 18 aa, synthetic construct
KTINGSGSPHSKARLWQT

SEQ ID NO: 1179 - protein, 18 aa, synthetic construct
KTINGSGSPHSRTRNQQT

SEQ ID NO: 1180 - protein, 18 aa, synthetic construct
KTINGSGSPHSKRSNQQT

SEQ ID NO: 1181 - protein, 18 aa, synthetic construct
KTINGSLSPHSWAQNQQT

SEQ ID NO: 1182 - protein, 18 aa, synthetic construct
KTINGSRSPHYKAQNQQT

SEQ ID NO: 1183 - protein, 18 aa, synthetic construct
KTINRHSSPHSKAQNQQT

SEQ ID NO: 1184 - protein, 18 aa, synthetic construct
KTINGSGSPHSKRRNQQT

SEQ ID NO: 1185 - protein, 18 aa, synthetic construct
KTINGSGSPHSKAKHLQT

SEQ ID NO: 1186 - protein, 18 aa, synthetic construct
KTINGSGSPHSKRTYQQT

SEQ ID NO: 1187 - protein, 18 aa, synthetic construct
KTINGVLSPHRKAQNQQT

SEQ ID NO: 1188 - protein, 18 aa, synthetic construct
KTINGSGSPHSFITNQQT

SEQ ID NO: 1189 - protein, 18 aa, synthetic construct
KTINGSGSPHSTRLNQQT

SEQ ID NO: 1190 - protein, 18 aa, synthetic construct
KTINGSGSPHSKRTSQQT

SEQ ID NO: 1191 - protein, 18 aa, synthetic construct
KTINGSGSPHSRRSNQQT

SEQ ID NO: 1192 - protein, 18 aa, synthetic construct
KTINGHLSPHRKAQNQQT

SEQ ID NO: 1193 - protein, 18 aa, synthetic construct
KTINGSGSPHSKAQFSRT

SEQ ID NO: 1194 - protein, 18 aa, synthetic construct
KTINGSGSPHSKAQTFRT

SEQ ID NO: 1195 - protein, 18 aa, synthetic construct
KTINGSGSPHSKPLRQQT

SEQ ID NO: 1196 - protein, 18 aa, synthetic construct
KTINGSGSPHSKASCRQT

SEQ ID NO: 1197 - protein, 18 aa, synthetic construct
KTINGSGSPHSKILWQQT

SEQ ID NO: 1198 - protein, 18 aa, synthetic construct
KTINGSGSPHSKALKRQT

SEQ ID NO: 1199 - protein, 18 aa, synthetic construct
KTINGSGSPHSKAHRSQT

SEQ ID NO: 1200 - protein, 18 aa, synthetic construct
KTINGSGSPHSMLYNQQT

SEQ ID NO: 1201 - protein, 18 aa, synthetic construct
KTINGSGSPHSKCTLQQT

SEQ ID NO: 1202 - protein, 18 aa, synthetic construct
KTINGSGSPHSKAQNRMR

SEQ ID NO: 1203 - protein, 18 aa, synthetic construct
KTINGSGSPHSKLVRQQT

SEQ ID NO: 1204 - protein, 18 aa, synthetic construct
KTINGSGSPHSKRILQQT

SEQ ID NO: 1205 - protein, 18 aa, synthetic construct
KTINGSGSPHSKAQWLRT

SEQ ID NO: 1206 - protein, 18 aa, synthetic construct
KTINGSGSPHSLTCNQQT

SEQ ID NO: 1207 - protein, 18 aa, synthetic construct
KTINGIRSPHTKAQNQQT

SEQ ID NO: 1208 - protein, 18 aa, synthetic construct
KTINGSGSPHSKAQRWLT

SEQ ID NO: 1209 - protein, 18 aa, synthetic construct
KTINGSGSPHSKAQLSIT

SEQ ID NO: 1210 - protein, 18 aa, synthetic construct
KTINGSGSPHIYRQNQQT

SEQ ID NO: 1211 - protein, 18 aa, synthetic construct
KTINGSGSPHSLRSNQQT

SEQ ID NO: 1212 - protein, 18 aa, synthetic construct
KTINGSGSPHSKVKPQQT

SEQ ID NO: 1213 - protein, 18 aa, synthetic construct
KTINGSGSPHSKATRHQT

SEQ ID NO: 1214 - protein, 18 aa, synthetic construct
KTINGSLSPHLCAQNQQT

SEQ ID NO: 1215 - protein, 18 aa, synthetic construct
KTINGSGSPHSKACASQT

SEQ ID NO: 1216 - protein, 18 aa, synthetic construct
KWSPGSGSPHSKAQNQQT

SEQ ID NO: 1217 - protein, 18 aa, synthetic construct
KTINGYLSPHRKAQNQQT

SEQ ID NO: 1218 - protein, 18 aa, synthetic construct
KTINGSGSPHSKVIRQQT

SEQ ID NO: 1219 - protein, 18 aa, synthetic construct
KTINGSGSPHFLLQNQQT

SEQ ID NO: 1220 - protein, 18 aa, synthetic construct
KTINGSGSPHSKARSKQT

SEQ ID NO: 1221 - protein, 18 aa, synthetic construct
KTINGVPSPHWKAQNQQT

SEQ ID NO: 1222 - protein, 18 aa, synthetic construct
KTINGSGSPHSKATRNQT

SEQ ID NO: 1223 - protein, 18 aa, synthetic construct
KTINGSGSPHSKACSAQT

SEQ ID NO: 1224 - protein, 18 aa, synthetic construct
KTINGSGSPHSKARYVQT

SEQ ID NO: 1225 - protein, 18 aa, synthetic construct
KTINGSRSPHARAQNQQT

SEQ ID NO: 1226 - protein, 18 aa, synthetic construct
KTINGSGSPHSKAQHLRT

SEQ ID NO: 1227 - protein, 18 aa, synthetic construct
KTINGSGSPHSKAKSRQT

SEQ ID NO: 1228 - protein, 18 aa, synthetic construct
KTINGSGSPHSKIGRQQT

SEQ ID NO: 1229 - protein, 18 aa, synthetic construct
KTINGLASPHRKAQNQQT

SEQ ID NO: 1230 - protein, 18 aa, synthetic construct
KTINGSGSPHSKARTRQT

SEQ ID NO: 1231 - protein, 18 aa, synthetic construct
KTINGSGSPHSKSIRQQT

SEQ ID NO: 1232 - protein, 18 aa, synthetic construct
KTINGSGSPHSKRLYQQT

SEQ ID NO: 1233 - protein, 18 aa, synthetic construct
KTINGLPSPHRKAQNQQT

SEQ ID NO: 1234 - protein, 18 aa, synthetic construct
KTINGSLSPHRRAQNQQT

SEQ ID NO: 1235 - protein, 18 aa, synthetic construct
KTINGKTSPHGKAQNQQT

SEQ ID NO: 1236 - protein, 18 aa, synthetic construct
KTINGSRSPHRLAQNQQT

SEQ ID NO: 1237 - protein, 18 aa, synthetic construct
KTINGSGSPHSLTWNQQT

SEQ ID NO: 1238 - protein, 18 aa, synthetic construct
KTINGSKSPHRKAQNQQT

SEQ ID NO: 1239 - protein, 18 aa, synthetic construct
KTINGSGSPHSKAQLRKT

SEQ ID NO: 1240 - protein, 18 aa, synthetic construct
KTINGSGSPHSKSRHQQT

SEQ ID NO: 1241 - protein, 18 aa, synthetic construct
KTINRRLSPHSKAQNQQT

SEQ ID NO: 1242 - protein, 18 aa, synthetic construct
KTINGSGSPHSRRVNQQT

SEQ ID NO: 1243 - protein, 18 aa, synthetic construct
KTINGSGSPHSHWQNQQT

SEQ ID NO: 1244 - protein, 18 aa, synthetic construct
KTTHCSGSPHSKAQNQQT

SEQ ID NO: 1245 - protein, 18 aa, synthetic construct
KTINGSGSPHSWLQNQQT

SEQ ID NO: 1246 - protein, 18 aa, synthetic construct
KTINGSTSPHYLAQNQQT

SEQ ID NO: 1247 - protein, 18 aa, synthetic construct
KTINGLTSPHRKAQNQQT

SEQ ID NO: 1248 - protein, 18 aa, synthetic construct
KTINGSGSPHSKRLLQQT

SEQ ID NO: 1249 - protein, 18 aa, synthetic construct
KTINGSGSPHSKLCVQQT

SEQ ID NO: 1250 - protein, 18 aa, synthetic construct
KTINGFLSPHRKAQNQQT

SEQ ID NO: 1251 - protein, 18 aa, synthetic construct
KTINGSGSPHSKMRPQQT

SEQ ID NO: 1252 - protein, 18 aa, synthetic construct
KTINGSGSPHSKQTRQQT

SEQ ID NO: 1253 - protein, 18 aa, synthetic construct
KTINGSGSPHSYLINQQT

SEQ ID NO: 1254 - protein, 18 aa, synthetic construct
KTINGSGSPHSKALRSQT

SEQ ID NO: 1255 - protein, 18 aa, synthetic construct
KTINGMLSPHRKAQNQQT

SEQ ID NO: 1256 - protein, 18 aa, synthetic construct
KTINGSGSPHSKCLTQQT

SEQ ID NO: 1257 - protein, 18 aa, synthetic construct
KTINGSGSPHSKAQLTLT

SEQ ID NO: 1258 - protein, 18 aa, synthetic construct
KTINGHSSPHRKAQNQQT

SEQ ID NO: 1259 - protein, 18 aa, synthetic construct
KTINGSGSPHLTWQNQQT

SEQ ID NO: 1260 - protein, 18 aa, synthetic construct
KTINGSGSPHSKAQYCLT

SEQ ID NO: 1261 - protein, 18 aa, synthetic construct
KTINGSGSPHSFLVNQQT

SEQ ID NO: 1262 - protein, 18 aa, synthetic construct
KTINMSRSPHSKAQNQQT

SEQ ID NO: 1263 - protein, 18 aa, synthetic construct
KTINGSGSPHSKAQLHRT

SEQ ID NO: 1264 - protein, 18 aa, synthetic construct
KTINGSGSPHLYMQNQQT

SEQ ID NO: 1265 - protein, 18 aa, synthetic construct
KTINGSRSPHRRAQNQQT

SEQ ID NO: 1266 - protein, 18 aa, synthetic construct
KTINGSGSPHSKAQNRRS

SEQ ID NO: 1267 - protein, 18 aa, synthetic construct
KTINLRFSPHSKAQNQQT

SEQ ID NO: 1268 - protein, 18 aa, synthetic construct
KTINGSGSPHSKAQRLWT

SEQ ID NO: 1269 - protein, 18 aa, synthetic construct
KTINGSGSPHSKGRAQQT

SEQ ID NO: 1270 - protein, 18 aa, synthetic construct
KTINGSGSPHSLSCNQQT

SEQ ID NO: 1271 - protein, 18 aa, synthetic construct
KTINGLVSPHCKAQNQQT

SEQ ID NO: 1272 - protein, 18 aa, synthetic construct
KTINGSSSPHLWAQNQQT

SEQ ID NO: 1273 - protein, 18 aa, synthetic construct
KTINGSGSPHSKAHRLQT

SEQ ID NO: 1274 - protein, 18 aa, synthetic construct
KTINGSGSPHPYAQNQQT

SEQ ID NO: 1275 - protein, 18 aa, synthetic construct
KTINGSGSPHSTRPNQQT

SEQ ID NO: 1276 - protein, 18 aa, synthetic construct
KTINGRSSPHPKAQNQQT

SEQ ID NO: 1277 - protein, 18 aa, synthetic construct
KTINGSGSPHSKAQSWRT

SEQ ID NO: 1278 - protein, 18 aa, synthetic construct
KTINGQRSPHVKAQNQQT

SEQ ID NO: 1279 - protein, 18 aa, synthetic construct
KTINGSGSPHSKAQFVRT

SEQ ID NO: 1280 - protein, 18 aa, synthetic construct
KTINGSGSPHSKCLNQQT

SEQ ID NO: 1281 - protein, 18 aa, synthetic construct
KTINGSGSPHSSLCNQQT

SEQ ID NO: 1282 - protein, 18 aa, synthetic construct
KTINGQRSPHSKAQNQQT

SEQ ID NO: 1283 - protein, 18 aa, synthetic construct
KTINGSGSPHSLSWNQQT

SEQ ID NO: 1284 - protein, 18 aa, synthetic construct
KTINGSGSPHSSRKNQQT

SEQ ID NO: 1285 - protein, 18 aa, synthetic construct
KTINGSGSPHSKRTLQQT

SEQ ID NO: 1286 - protein, 18 aa, synthetic construct
KTINGSLSPHCLAQNQQT

SEQ ID NO: 1287 - protein, 18 aa, synthetic construct
KTINGSGSPHSKAQSSRT

SEQ ID NO: 1288 - protein, 18 aa, synthetic construct
KTINGSGSPHLKRQNQQT

SEQ ID NO: 1289 - protein, 18 aa, synthetic construct
KTINGSGSPHSKARMGQT

SEQ ID NO: 1290 - protein, 18 aa, synthetic construct
KTINGSGSPHSKAQVKLT

SEQ ID NO: 1291 - protein, 18 aa, synthetic construct
KTINGSGSPHSKLPRQQT

SEQ ID NO: 1292 - protein, 18 aa, synthetic construct
KTINGSGSPHSKLCLQQT

SEQ ID NO: 1293 - protein, 18 aa, synthetic construct
KTINGSGSPHSPLWNQQT

SEQ ID NO: 1294 - protein, 18 aa, synthetic construct
KTINGSVSPHSWAQNQQT

SEQ ID NO: 1295 - protein, 18 aa, synthetic construct
KTIRSKGSPHSKAQNQQT

SEQ ID NO: 1296 - protein, 18 aa, synthetic construct
KTINGSRSPHSWAQNQQT

SEQ ID NO: 1297 - protein, 18 aa, synthetic construct
KTINGSGSPHSKILRQQT

SEQ ID NO: 1298 - protein, 18 aa, synthetic construct
KTINGRQSPHVKAQNQQT

SEQ ID NO: 1299 - protein, 18 aa, synthetic construct
KTINGSGSPHSKAQSIKT

SEQ ID NO: 1300 - protein, 18 aa, synthetic construct
KTINGSGSPHSKAQASKT

SEQ ID NO: 1301 - protein, 18 aa, synthetic construct
KTINGSGSPHSRLFNQQT

SEQ ID NO: 1302 - protein, 18 aa, synthetic construct
KTINGSGSPHIYLQNQQT

SEQ ID NO: 1303 - protein, 18 aa, synthetic construct
KTINGSGSPHSRVRNQQT

SEQ ID NO: 1304 - protein, 18 aa, synthetic construct
KTINGSGSPHSKAVRAQT

SEQ ID NO: 1305 - protein, 18 aa, synthetic construct
KTINGSGSPHSKPARQQT

SEQ ID NO: 1306 - protein, 18 aa, synthetic construct
KTINGSGSPHSRYSNQQT

SEQ ID NO: 1307 - protein, 18 aa, synthetic construct
KTINGSRSPHRSAQNQQT

SEQ ID NO: 1308 - protein, 18 aa, synthetic construct
KTINGSLSPHIYAQNQQT

SEQ ID NO: 1309 - protein, 18 aa, synthetic construct
KTINGSGSPHSKPVRQQT

SEQ ID NO: 1310 - protein, 18 aa, synthetic construct
KTINGMRSPHGKAQNQQT

SEQ ID NO: 1311 - protein, 18 aa, synthetic construct
KTINGSGSPHSKARITQT

SEQ ID NO: 1312 - protein, 18 aa, synthetic construct
KTINGSGSPHSWSLNQQT

SEQ ID NO: 1313 - protein, 18 aa, synthetic construct
KTINTSRSPHSKAQNQQT

SEQ ID NO: 1314 - protein, 18 aa, synthetic construct
KTINGSGSPHSKAFTRQT

SEQ ID NO: 1315 - protein, 18 aa, synthetic construct
KTINGSGSPHSKAVRNQT

SEQ ID NO: 1316 - protein, 18 aa, synthetic construct
KTINGSGSPHSKAQTNRT

SEQ ID NO: 1317 - protein, 18 aa, synthetic construct
KTINGSGSPHSKANRMQT

SEQ ID NO: 1318 - protein, 18 aa, synthetic construct
KTINGSGSPHSKAQLVLT

SEQ ID NO: 1319 - protein, 18 aa, synthetic construct
KTINGSGSPHSKATRQQT

SEQ ID NO: 1320 - protein, 18 aa, synthetic construct
KTINGSGSPHSKARGTQT

SEQ ID NO: 1321 - protein, 18 aa, synthetic construct
KTINGSGSPHSKAQWSVT

SEQ ID NO: 1322 - protein, 18 aa, synthetic construct
KTINGSGSPHSKAWLIQT

SEQ ID NO: 1323 - protein, 18 aa, synthetic construct
KTINGSGSPHSKAFRPQT

SEQ ID NO: 1324 - protein, 18 aa, synthetic construct
KTINGSGSPHRRSQNQQT

SEQ ID NO: 1325 - protein, 18 aa, synthetic construct
KTINGSGSPHSKGIRQQT

SEQ ID NO: 1326 - protein, 18 aa, synthetic construct
KTINGSGSPHCTLQNQQT

SEQ ID NO: 1327 - protein, 18 aa, synthetic construct
KPLPGSGSPHSKAQNQQT

SEQ ID NO: 1328 - protein, 18 aa, synthetic construct
KTINGSGSPHLVCQNQQT

SEQ ID NO: 1329 - protein, 18 aa, synthetic construct
KTINGSGSPHSKARGYQT

SEQ ID NO: 1330 - protein, 18 aa, synthetic construct
KTINGRISPHGKAQNQQT

SEQ ID NO: 1331 - protein, 18 aa, synthetic construct
KTINGSSSPHWLAQNQQT

SEQ ID NO: 1332 - protein, 18 aa, synthetic construct
KTINGSGSPHSKARMAQT

SEQ ID NO: 1333 - protein, 18 aa, synthetic construct
KPLDGSGSPHSKAQNQQT

SEQ ID NO: 1334 - protein, 18 aa, synthetic construct
KPLRGSGSPHSKAQNQQT

SEQ ID NO: 1335 - protein, 18 aa, synthetic construct
KTINGSGSPHSKAQNAKL

SEQ ID NO: 1336 - protein, 18 aa, synthetic construct
KTINGSGSPHSKLSKQQT

SEQ ID NO: 1337 - protein, 18 aa, synthetic construct
KTINGSGSPHSKARNGQT

SEQ ID NO: 1338 - protein, 18 aa, synthetic construct
KTINGSGSPHSKAQRRQT

SEQ ID NO: 1339 - protein, 18 aa, synthetic construct
KTINGSGSPHSKWPGQQT

SEQ ID NO: 1340 - protein, 18 aa, synthetic construct
KTINGSGSPHAFLQNQQT

SEQ ID NO: 1341 - protein, 18 aa, synthetic construct
KTINGILSPHRKAQNQQT

SEQ ID NO: 1342 - protein, 18 aa, synthetic construct
KTINGSGSPHSWGSNQQT

SEQ ID NO: 1343 - protein, 18 aa, synthetic construct
KTINGSGSPHSSCLNQQT

SEQ ID NO: 1344 - protein, 18 aa, synthetic construct
KTINGSGSPHSKAQSVKT

SEQ ID NO: 1345 - protein, 18 aa, synthetic construct
KTINGSGSPHSLRYNQQT

SEQ ID NO: 1346 - protein, 18 aa, synthetic construct
KTINGSGSPHSKARKLQT

SEQ ID NO: 1347 - protein, 18 aa, synthetic construct
KHRSGSGSPHSKAQNQQT

SEQ ID NO: 1348 - protein, 18 aa, synthetic construct
KTINGSGSPHSKWSLQQT

SEQ ID NO: 1349 - protein, 18 aa, synthetic construct
KTINGSGSPHSKAQTMRT

SEQ ID NO: 1350 - protein, 18 aa, synthetic construct
KTINGSGSPHSKTIRQQT

SEQ ID NO: 1351 - protein, 18 aa, synthetic construct
KTINGKLSPHMKAQNQQT

SEQ ID NO: 1352 - protein, 18 aa, synthetic construct
KTINGSGSPHSKARPFQT

SEQ ID NO: 1353 - protein, 18 aa, synthetic construct
KTINGSGSPHSKPRVQQT

SEQ ID NO: 1354 - protein, 18 aa, synthetic construct
KTINGSGSPHSKAQVVLT

SEQ ID NO: 1355 - protein, 18 aa, synthetic construct
KTRRSSGSPHSKAQNQQT

SEQ ID NO: 1356 - protein, 18 aa, synthetic construct
KTINGSGSPHSKPSRQQT

SEQ ID NO: 1357 - protein, 18 aa, synthetic construct
KTINGSGSPHSVYRNQQT

SEQ ID NO: 1358 - protein, 18 aa, synthetic construct
KTINGSGSPHSKTCSQQT

SEQ ID NO: 1359 - protein, 18 aa, synthetic construct
KTINGSPSPHRKAQNQQT

SEQ ID NO: 1360 - protein, 18 aa, synthetic construct
KTINGRSSPHFKAQNQQT

SEQ ID NO: 1361 - protein, 18 aa, synthetic construct
KTINGSGSPHSKAQMVRT

SEQ ID NO: 1362 - protein, 18 aa, synthetic construct
KTINGSRSPHCSAQNQQT

SEQ ID NO: 1363 - protein, 18 aa, synthetic construct
KTINGSCSPHLRAQNQQT

SEQ ID NO: 1364 - protein, 18 aa, synthetic construct
KTINGSGSPHSKAQCLFT

SEQ ID NO: 1365 - protein, 18 aa, synthetic construct
KTINGRPSPHVKAQNQQT

SEQ ID NO: 1366 - protein, 18 aa, synthetic construct
KTINGSGSPHSMFPNQQT

SEQ ID NO: 1367 - protein, 18 aa, synthetic construct
KTINGMKSPHSKAQNQQT

SEQ ID NO: 1368 - protein, 18 aa, synthetic construct
KTINGSGSPHSKVRAQQT

SEQ ID NO: 1369 - protein, 18 aa, synthetic construct
KGLVGSGSPHSKAQNQQT

SEQ ID NO: 1370 - protein, 18 aa, synthetic construct
KTINGSRSPHVRAQNQQT

SEQ ID NO: 1371 - protein, 18 aa, synthetic construct
KTIRLRGSPHSKAQNQQT

SEQ ID NO: 1372 - protein, 18 aa, synthetic construct
KPRLGSGSPHSKAQNQQT

SEQ ID NO: 1373 - protein, 18 aa, synthetic construct
KTINGSGSPHSKAWYPQT

SEQ ID NO: 1374 - protein, 18 aa, synthetic construct
KTINGSCSPHVRAQNQQT

SEQ ID NO: 1375 - protein, 18 aa, synthetic construct
KTINGSGSPHSKRNVQQT

SEQ ID NO: 1376 - protein, 18 aa, synthetic construct
KTINGSGSPHSKRGLQQT

SEQ ID NO: 1377 - protein, 18 aa, synthetic construct
KTINGSGSPHSKRLAQQT

SEQ ID NO: 1378 - protein, 18 aa, synthetic construct
KTINGSGSPHSKVTRQQT

SEQ ID NO: 1379 - protein, 18 aa, synthetic construct
KTINGSGSPHTWLQNQQT

SEQ ID NO: 1380 - protein, 18 aa, synthetic construct
KTINGSGSPHSKQRSQQT

SEQ ID NO: 1381 - protein, 18 aa, synthetic construct
KTINGSGSPHSKAQRCST

SEQ ID NO: 1382 - protein, 18 aa, synthetic construct
KTINGSPSPHYLAQNQQT

SEQ ID NO: 1383 - protein, 18 aa, synthetic construct
KTINGRRSPHLKAQNQQT

SEQ ID NO: 1384 - protein, 18 aa, synthetic construct
KTINGSGSPHWSLQNQQT

SEQ ID NO: 1385 - protein, 18 aa, synthetic construct
KTINGVTSPHWKAQNQQT

SEQ ID NO: 1386 - protein, 18 aa, synthetic construct
KTINGSGSPHSKAQTTRT

SEQ ID NO: 1387 - protein, 18 aa, synthetic construct
KTINGSGSPHSKAQLFKT

SEQ ID NO: 1388 - protein, 18 aa, synthetic construct
KTINGSGSPHSKARSYQT

SEQ ID NO: 1389 - protein, 18 aa, synthetic construct
KTINGSGSPHSKLSRQQT

SEQ ID NO: 1390 - protein, 18 aa, synthetic construct
KTINGSGSPHLVFQNQQT

SEQ ID NO: 1391 - protein, 18 aa, synthetic construct
KTINGSGSPHSKAQLVKT

SEQ ID NO: 1392 - protein, 18 aa, synthetic construct
KTINGSGSPHSKAQTGRT

SEQ ID NO: 1393 - protein, 18 aa, synthetic construct
KTINGSGSPHSKARYSQT

SEQ ID NO: 1394 - protein, 18 aa, synthetic construct
KTINGRHSPHLKAQNQQT

SEQ ID NO: 1395 - protein, 18 aa, synthetic construct
KTINGSGSPHSFARNQQT

SEQ ID NO: 1396 - protein, 18 aa, synthetic construct
KTINGSGSPHSSCQNQQT

SEQ ID NO: 1397 - protein, 18 aa, synthetic construct
KTINGSGSPHSLFANQQT

SEQ ID NO: 1398 - protein, 18 aa, synthetic construct
KTINGSGSPHSKRLTQQT

SEQ ID NO: 1399 - protein, 18 aa, synthetic construct
KTINGSGSPHSKAQTART

SEQ ID NO: 1400 - protein, 18 aa, synthetic construct
KTINGSGSPHFLNQNQQT

SEQ ID NO: 1401 - protein, 18 aa, synthetic construct
KTINGSGSPHSKAQLILT

SEQ ID NO: 1402 - protein, 18 aa, synthetic construct
KEVGGSGSPHSKAQNQQT

SEQ ID NO: 1403 - protein, 18 aa, synthetic construct
KTINGSRSPHIRAQNQQT

SEQ ID NO: 1404 - protein, 18 aa, synthetic construct
KTINGSGSPHSSWLNQQT

SEQ ID NO: 1405 - protein, 18 aa, synthetic construct
KTINGSMSPHLYAQNQQT

SEQ ID NO: 1406 - protein, 18 aa, synthetic construct
KTINGMSSPHRKAQNQQT

SEQ ID NO: 1407 - protein, 18 aa, synthetic construct
KTINGSGSPHSKPRPQQT

SEQ ID NO: 1408 - protein, 18 aa, synthetic construct
KTINGSGSPHSGLWNQQT

SEQ ID NO: 1409 - protein, 18 aa, synthetic construct
KTINGSGSPHRWAQNQQT

SEQ ID NO: 1410 - protein, 18 aa, synthetic construct
KTINGSGSPHSKIRLQQT

SEQ ID NO: 1411 - protein, 18 aa, synthetic construct
KTINGSGSPHSKFSCQQT

SEQ ID NO: 1412 - protein, 18 aa, synthetic construct
KTINGSGSPHSKSCAQQT

SEQ ID NO: 1413 - protein, 18 aa, synthetic construct
KTINGSGSPHSKRLMQQT

SEQ ID NO: 1414 - protein, 18 aa, synthetic construct
KTSRCSGSPHSKAQNQQT

SEQ ID NO: 1415 - protein, 18 aa, synthetic construct
KTINGSGSPHSFLLNQQT

SEQ ID NO: 1416 - protein, 18 aa, synthetic construct
KTINGSGSPHCSAQNQQT

SEQ ID NO: 1417 - protein, 18 aa, synthetic construct
KTINGSGSPHSKAQPSKT

SEQ ID NO: 1418 - protein, 18 aa, synthetic construct
KTINGSGSPHSYVRNQQT

SEQ ID NO: 1419 - protein, 18 aa, synthetic construct
KTINGSGSPHSKAQQSRT

SEQ ID NO: 1420 - protein, 18 aa, synthetic construct
KTINGSGSPHSFVVNQQT

SEQ ID NO: 1421 - protein, 18 aa, synthetic construct
KTINGFRSPHSKAQNQQT

SEQ ID NO: 1422 - protein, 18 aa, synthetic construct
KTINGSGSPHSKWLVQQT

SEQ ID NO: 1423 - protein, 18 aa, synthetic construct
KTINGSGSPHSKRTAQQT

SEQ ID NO: 1424 - protein, 18 aa, synthetic construct
KTINGLFSPHRKAQNQQT

SEQ ID NO: 1425 - protein, 18 aa, synthetic construct
KTINTIESPHSKAQNQQT

SEQ ID NO: 1426 - protein, 18 aa, synthetic construct
KRLFGSGSPHSKAQNQQT

SEQ ID NO: 1427 - protein, 18 aa, synthetic construct
KTINGSGSPHSKAPNHLT

SEQ ID NO: 1428 - protein, 18 aa, synthetic construct
KTINGSGSPHLFRQNQQT

SEQ ID NO: 1429 - protein, 18 aa, synthetic construct
KTINGSGSPHSKASRHQT

SEQ ID NO: 1430 - protein, 18 aa, synthetic construct
KTINGSGSPHSKLSWQQT

SEQ ID NO: 1431 - protein, 18 aa, synthetic construct
KETAGSGSPHSKAQNQQT

SEQ ID NO: 1432 - protein, 18 aa, synthetic construct
KTINGHRSPHLKAQNQQT

SEQ ID NO: 1433 - protein, 18 aa, synthetic construct
KTINGSGSPHSKGCLQQT

SEQ ID NO: 1434 - protein, 18 aa, synthetic construct
KTINGSGSPHSKAQVLIT

SEQ ID NO: 1435 - protein, 18 aa, synthetic construct
KTINGSGSPHSKLRSQQT

SEQ ID NO: 1436 - protein, 18 aa, synthetic construct
KTINGTLSPHRKAQNQQT

SEQ ID NO: 1437 - protein, 18 aa, synthetic construct
KTINGSGSPHSTWTNQQT

SEQ ID NO: 1438 - protein, 18 aa, synthetic construct
KTINGSGSPHSKAQCRLT

SEQ ID NO: 1439 - protein, 18 aa, synthetic construct
KTINNLRSPHSKAQNQQT

SEQ ID NO: 1440 - protein, 18 aa, synthetic construct
KTINGSGSPHSKARANQT

SEQ ID NO: 1441 - protein, 18 aa, synthetic construct
KTINGRQSPHTKAQNQQT

SEQ ID NO: 1442 - protein, 18 aa, synthetic construct
KTINSARSPHSKAQNQQT

SEQ ID NO: 1443 - protein, 18 aa, synthetic construct
KTINGCSSPHRKAQNQQT

SEQ ID NO: 1444 - protein, 18 aa, synthetic construct
KTINGSVSPHFMAQNQQT

SEQ ID NO: 1445 - protein, 18 aa, synthetic construct
KTINGSGSPHSLCQNQQT

SEQ ID NO: 1446 - protein, 18 aa, synthetic construct
KTINGSLSPHLFAQNQQT

SEQ ID NO: 1447 - protein, 18 aa, synthetic construct
KTINGSGSPHSKACPLQT

SEQ ID NO: 1448 - protein, 18 aa, synthetic construct
KTINGRTSPHRKAQNQQT

SEQ ID NO: 1449 - protein, 18 aa, synthetic construct
KTINGSGSPHSKRATQQT

SEQ ID NO: 1450 - protein, 18 aa, synthetic construct
KTINGSGSPHSKARIMQT

SEQ ID NO: 1451 - protein, 18 aa, synthetic construct
KTINGSGSPHVTWQNQQT

SEQ ID NO: 1452 - protein, 18 aa, synthetic construct
KTINGSGSPHSKRLPQQT

SEQ ID NO: 1453 - protein, 18 aa, synthetic construct
KTINGSGSPHSKAQGFRT

SEQ ID NO: 1454 - protein, 18 aa, synthetic construct
KTINGSGSPHLYGQNQQT

SEQ ID NO: 1455 - protein, 18 aa, synthetic construct
KTINGSGSPHLSCQNQQT

SEQ ID NO: 1456 - protein, 18 aa, synthetic construct
KTINGSGSPHSKAQFTLT

SEQ ID NO: 1457 - protein, 18 aa, synthetic construct
KTINGSRSPHFKAQNQQT

SEQ ID NO: 1458 - protein, 18 aa, synthetic construct
KTINGRPSPHSKAQNQQT

SEQ ID NO: 1459 - protein, 18 aa, synthetic construct
KTINGFSSPHRKAQNQQT

SEQ ID NO: 1460 - protein, 18 aa, synthetic construct
KTINGRASPHVKAQNQQT

SEQ ID NO: 1461 - protein, 18 aa, synthetic construct
KTINGSGSPHSKAQNEVH

SEQ ID NO: 1462 - protein, 18 aa, synthetic construct
KTINGSGSPHSKRSLQQT

SEQ ID NO: 1463 - protein, 18 aa, synthetic construct
KTINGSGSPHRSRQNQQT

SEQ ID NO: 1464 - protein, 18 aa, synthetic construct
KPPTGSGSPHSKAQNQQT

SEQ ID NO: 1465 - protein, 18 aa, synthetic construct
KTINGSGSPHSKAARTQT

SEQ ID NO: 1466 - protein, 18 aa, synthetic construct
KTINGSGSPHSSWANQQT

SEQ ID NO: 1467 - protein, 18 aa, synthetic construct
KTINGSGSPHSKAQRHAT

SEQ ID NO: 1468 - protein, 18 aa, synthetic construct
KTINSPRSPHSKAQNQQT

SEQ ID NO: 1469 - protein, 18 aa, synthetic construct
KTINGSGSPHSKSERQQT

SEQ ID NO: 1470 - protein, 18 aa, synthetic construct
KTINGSGSPHALFQNQQT

SEQ ID NO: 1471 - protein, 18 aa, synthetic construct
KTINGSGSPHSKAQCYVT

SEQ ID NO: 1472 - protein, 18 aa, synthetic construct
KTINGVASPHRKAQNQQT

SEQ ID NO: 1473 - protein, 18 aa, synthetic construct
KTINGSGSPHSALWNQQT

SEQ ID NO: 1474 - protein, 18 aa, synthetic construct
KTINGSGSPHSKSVRQQT

SEQ ID NO: 1475 - protein, 18 aa, synthetic construct
KTINGSGSPHSHMENQQT

SEQ ID NO: 1476 - protein, 18 aa, synthetic construct
KTINGSGTPHSKAQNQQT

SEQ ID NO: 1477 - protein, 18 aa, synthetic construct
KTINGSGSPHSKTGRQQT

SEQ ID NO: 1478 - protein, 18 aa, synthetic construct
KTINGSGSPHSKAQANRT

SEQ ID NO: 1479 - protein, 18 aa, synthetic construct
KTINGSGSPHSKARFSQT

SEQ ID NO: 1480 - protein, 18 aa, synthetic construct
KYLLGSGSPHSKAQNQQT

SEQ ID NO: 1481 - protein, 18 aa, synthetic construct
KTINGSGSPHCSSQNQQT

SEQ ID NO: 1482 - protein, 18 aa, synthetic construct
KTINGSMSPHRKAQNQQT

SEQ ID NO: 1483 - protein, 18 aa, synthetic construct
KTINGNLSPHRKAQNQQT

SEQ ID NO: 1484 - protein, 18 aa, synthetic construct
KEVAGSGSPHSKAQNQQT

SEQ ID NO: 1485 - protein, 18 aa, synthetic construct
KTINLSRSPHSKAQNQQT

SEQ ID NO: 1486 - protein, 18 aa, synthetic construct
KTINGSGSPHSKARQQQT

SEQ ID NO: 1487 - protein, 18 aa, synthetic construct
KTINGTPSPHRKAQNQQT

SEQ ID NO: 1488 - protein, 18 aa, synthetic construct
KTINGSGSPHSKFKLQQT

SEQ ID NO: 1489 - protein, 18 aa, synthetic construct
KTINGSGSPHSKAWLLQT

SEQ ID NO: 1490 - protein, 18 aa, synthetic construct
KTINGLRSPHSKAQNQQT

SEQ ID NO: 1491 - protein, 18 aa, synthetic construct
KTINGRLSPHRKAQNQQT

SEQ ID NO: 1492 - protein, 18 aa, synthetic construct
KTINGSPSPHLFAQNQQT

SEQ ID NO: 1493 - protein, 18 aa, synthetic construct
KDLRGSGSPHSKAQNQQT

SEQ ID NO: 1494 - protein, 18 aa, synthetic construct
KTINGSGSPHSKAQLAKT

SEQ ID NO: 1495 - protein, 18 aa, synthetic construct
KTINGSGSPHSKPRSQQT

SEQ ID NO: 1496 - protein, 18 aa, synthetic construct
KTINGSGSPHSKKMSQQT

SEQ ID NO: 1497 - protein, 18 aa, synthetic construct
KTINGSGSPHSKAQLIVT

SEQ ID NO: 1498 - protein, 18 aa, synthetic construct
KTINGSGSPHSKARFTQT

SEQ ID NO: 1499 - protein, 18 aa, synthetic construct
KTINGSGSPHPLFQNQQT

SEQ ID NO: 1500 - protein, 18 aa, synthetic construct
KTINGSGSPHSKAQRGMT

SEQ ID NO: 1501 - protein, 18 aa, synthetic construct
KTINGSGSPHSKAQNLRR

SEQ ID NO: 1502 - protein, 18 aa, synthetic construct
KTINGSGSPHSKAQFRVT

SEQ ID NO: 1503 - protein, 18 aa, synthetic construct
KTINGSGSPHSKAFVRQT

SEQ ID NO: 1504 - protein, 18 aa, synthetic construct
KTINGSGSPHSKARLTQT

SEQ ID NO: 1505 - protein, 18 aa, synthetic construct
KTINGSGSPHRFKQNQQT

SEQ ID NO: 1506 - protein, 18 aa, synthetic construct
KTINGSGSPHSKEETQQT

SEQ ID NO: 1507 - protein, 18 aa, synthetic construct
KTINGSGSPHSKTRAQQT

SEQ ID NO: 1508 - protein, 18 aa, synthetic construct
KTINGSGSPHSVSWNQQT

SEQ ID NO: 1509 - protein, 18 aa, synthetic construct
KTINGSGSPHTKWQNQQT

SEQ ID NO: 1510 - protein, 18 aa, synthetic construct
KTINGSNSPHRKAQNQQT

SEQ ID NO: 1511 - protein, 18 aa, synthetic construct
KTINGSGSPHSKAQNKRS

SEQ ID NO: 1512 - protein, 18 aa, synthetic construct
KTINGSGSPHSTRQNQQT

SEQ ID NO: 1513 - protein, 18 aa, synthetic construct
KTINGTRSPHTKAQNQQT

SEQ ID NO: 1514 - protein, 18 aa, synthetic construct
KTINGSGSPHVLFQNQQT

SEQ ID NO: 1515 - protein, 18 aa, synthetic construct
KTINGSVSPHYLAQNQQT

SEQ ID NO: 1516 - protein, 18 aa, synthetic construct
KTINGALSPHRKAQNQQT

SEQ ID NO: 1517 - protein, 18 aa, synthetic construct
KTINGSGSPHSKARLYQT

SEQ ID NO: 1518 - protein, 18 aa, synthetic construct
KTINGSGSPHEHNQNQQT

SEQ ID NO: 1519 - protein, 18 aa, synthetic construct
KTINGVLSPHWKAQNQQT

SEQ ID NO: 1520 - protein, 18 aa, synthetic construct
KTINGSGSPHSKASRQQT

SEQ ID NO: 1521 - protein, 18 aa, synthetic construct
KTINGSGSPHSKRSFQQT

SEQ ID NO: 1522 - protein, 18 aa, synthetic construct
KTINGSGSPHSKRVSQQT

SEQ ID NO: 1523 - protein, 18 aa, synthetic construct
KTINGSGSPHSYSRNQQT

SEQ ID NO: 1524 - protein, 18 aa, synthetic construct
KTINGSGSPHSTVWNQQT

SEQ ID NO: 1525 - protein, 18 aa, synthetic construct
KTINGSGSPHSVLFNQQT

SEQ ID NO: 1526 - protein, 18 aa, synthetic construct
KTINGPLSPHCKAQNQQT

SEQ ID NO: 1527 - protein, 18 aa, synthetic construct
KTINGSGSPHSKRVGQQT

SEQ ID NO: 1528 - protein, 18 aa, synthetic construct
KTINGSGSPHSKLWSQQT

SEQ ID NO: 1529 - protein, 18 aa, synthetic construct
KTINGSGSPHSKAQGVRT

SEQ ID NO: 1530 - protein, 18 aa, synthetic construct
KTINGSVSPHRRAQNQQT

SEQ ID NO: 1531 - protein, 18 aa, synthetic construct
KTINGSGSPHLRFQNQQT

SEQ ID NO: 1532 - protein, 18 aa, synthetic construct
KTINGSASPHVFAQNQQT

SEQ ID NO: 1533 - protein, 18 aa, synthetic construct
KTWVRSGSPHSKAQNQQT

SEQ ID NO: 1534 - protein, 18 aa, synthetic construct
KTINGSGSPHSKARMQQT

SEQ ID NO: 1535 - protein, 18 aa, synthetic construct
KTINGSGSPHSKASRGQT

SEQ ID NO: 1536 - protein, 18 aa, synthetic construct
KTINGSGSPHSKAQVCLT

SEQ ID NO: 1537 - protein, 18 aa, synthetic construct
KTINGSGSPHSKARGVQT

SEQ ID NO: 1538 - protein, 18 aa, synthetic construct
KTINGSGSPHGLWQNQQT

SEQ ID NO: 1539 - protein, 18 aa, synthetic construct
KTINGSGSPHSKAQVWFT

SEQ ID NO: 1540 - protein, 18 aa, synthetic construct
KTINGSGSPHSKAQVTLT

SEQ ID NO: 1541 - protein, 18 aa, synthetic construct
KTINGSGSPHSKAQLRIT

SEQ ID NO: 1542 - protein, 18 aa, synthetic construct
KDSLGSGSPHSKAQNQQT

SEQ ID NO: 1543 - protein, 18 aa, synthetic construct
KTINGSGSPHSKRASQQT

SEQ ID NO: 1544 - protein, 18 aa, synthetic construct
KTINGSGSPHSKRINQQT

SEQ ID NO: 1545 - protein, 18 aa, synthetic construct
KTINGSGSPHSKASKNQT

SEQ ID NO: 1546 - protein, 18 aa, synthetic construct
KTINGSGSPHSKAQLPWT

SEQ ID NO: 1547 - protein, 18 aa, synthetic construct
KTINGSGSPHSKLTRQQT

SEQ ID NO: 1548 - protein, 18 aa, synthetic construct
KTINGSGSPHSKTNRQQT

SEQ ID NO: 1549 - protein, 18 aa, synthetic construct
KTINRVISPHSKAQNQQT

SEQ ID NO: 1550 - protein, 18 aa, synthetic construct
KTINGSGSPHTLWQNQQT

SEQ ID NO: 1551 - protein, 18 aa, synthetic construct
KTINGSGSPHSRRQNQQT

SEQ ID NO: 1552 - protein, 18 aa, synthetic construct
KTINGSGSPHSKGGRQQT

SEQ ID NO: 1553 - protein, 18 aa, synthetic construct
KTINGSESPHDSAQNQQT

SEQ ID NO: 1554 - protein, 18 aa, synthetic construct
KTINGSGSPHSRPRNQQT

SEQ ID NO: 1555 - protein, 18 aa, synthetic construct
KTINGSGSPHSRKQNQQT

SEQ ID NO: 1556 - protein, 18 aa, synthetic construct
KTINGSGSPHSKAQEELT

SEQ ID NO: 1557 - protein, 18 aa, synthetic construct
KTINGWRSPHSKAQNQQT

SEQ ID NO: 1558 - protein, 18 aa, synthetic construct
KTINGSGSPHSLLYNQQT

SEQ ID NO: 1559 - protein, 18 aa, synthetic construct
KTINGSGSPHSFRLNQQT

SEQ ID NO: 1560 - protein, 18 aa, synthetic construct
KTINGSGSPHSKAQFLRT

SEQ ID NO: 1561 - protein, 18 aa, synthetic construct
KTINGSGSPHSKQSRQQT

SEQ ID NO: 1562 - protein, 18 aa, synthetic construct
KTINGSRSPHSKAQNRQT

SEQ ID NO: 1563 - protein, 18 aa, synthetic construct
KTINGRPSPHIKAQNQQT

SEQ ID NO: 1564 - protein, 18 aa, synthetic construct
KTINGSGSPHSKRLVQQT

SEQ ID NO: 1565 - protein, 18 aa, synthetic construct
KGHEGSGSPHSKAQNQQT

SEQ ID NO: 1566 - protein, 18 aa, synthetic construct
KTINGSGSPHSKAQKRST

SEQ ID NO: 1567 - protein, 18 aa, synthetic construct
KTINGSGSPHSYLLNQQT

SEQ ID NO: 1568 - protein, 18 aa, synthetic construct
KTINGSGSPHSKPRGQQT

SEQ ID NO: 1569 - protein, 18 aa, synthetic construct
KTINGSGSPHSKTRLQQT

SEQ ID NO: 1570 - protein, 18 aa, synthetic construct
KTINGSGSPHSKSHRQQT

SEQ ID NO: 1571 - protein, 18 aa, synthetic construct
KEIKGSGSPHSKAQNQQT

SEQ ID NO: 1572 - protein, 18 aa, synthetic construct
KTINGSGSPHSKARGIQT

SEQ ID NO: 1573 - protein, 18 aa, synthetic construct
KTINGYRSPHSKAQNQQT

SEQ ID NO: 1574 - protein, 18 aa, synthetic construct
KTINGSGSPHSKLWTQQT

SEQ ID NO: 1575 - protein, 18 aa, synthetic construct
KTINGSGSPHSKPWLQQT

SEQ ID NO: 1576 - protein, 18 aa, synthetic construct
KTINGSGSPHWSVQNQQT

SEQ ID NO: 1577 - protein, 18 aa, synthetic construct
KTINGSGSPHSKVARQQT

SEQ ID NO: 1578 - protein, 18 aa, synthetic construct
KTINGSGSPHTLFQNQQT

SEQ ID NO: 1579 - protein, 18 aa, synthetic construct
KTINGSCSPHLAAQNQQT

SEQ ID NO: 1580 - protein, 18 aa, synthetic construct
KTINGSGSPHSKTSRQQT

SEQ ID NO: 1581 - protein, 18 aa, synthetic construct
KTINGSGSPHSKAQNARH

SEQ ID NO: 1582 - protein, 18 aa, synthetic construct
KTINGSGSPHSKAQLKLT

SEQ ID NO: 1583 - protein, 18 aa, synthetic construct
KTINGSGSPHSKAQNWRT

SEQ ID NO: 1584 - protein, 18 aa, synthetic construct
KTINGSGSPHFLPQNQQT

SEQ ID NO: 1585 - protein, 18 aa, synthetic construct
KTINGSGSPHSKNVRQQT

SEQ ID NO: 1586 - protein, 18 aa, synthetic construct
KTINGSGSPHFMRQNQQT

SEQ ID NO: 1587 - protein, 18 aa, synthetic construct
KTINGSGSPHGWAQNQQT

SEQ ID NO: 1588 - protein, 18 aa, synthetic construct
KTINGSGSPHFHLQNQQT

SEQ ID NO: 1589 - protein, 18 aa, synthetic construct
KTINGSASPHWSAQNQQT

SEQ ID NO: 1590 - protein, 18 aa, synthetic construct
KTINGSSSPHSWAQNQQT

SEQ ID NO: 1591 - protein, 18 aa, synthetic construct
KTINGSGSPHSKAHRQQT

SEQ ID NO: 1592 - protein, 18 aa, synthetic construct
KTINGSGSPHSKQRVQQT

SEQ ID NO: 1593 - protein, 18 aa, synthetic construct
KTLRRSGSPHSKAQNQQT

SEQ ID NO: 1594 - protein, 18 aa, synthetic construct
KTINGSGSPHSKGVRQQT

SEQ ID NO: 1595 - protein, 18 aa, synthetic construct
KTINGSLSPHTWAQNQQT

SEQ ID NO: 1596 - protein, 18 aa, synthetic construct
KTINGSGSPHSKRALQQT

SEQ ID NO: 1597 - protein, 18 aa, synthetic construct
KTINGSGSPHCLSQNQQT

SEQ ID NO: 1598 - protein, 18 aa, synthetic construct
KTINGSGSPHSKAQSLKT

SEQ ID NO: 1599 - protein, 18 aa, synthetic construct
KTINGSGSPHSFVRNQQT

SEQ ID NO: 1600 - protein, 18 aa, synthetic construct
KTINGSGSPHSIFSNQQT

SEQ ID NO: 1601 - protein, 18 aa, synthetic construct
KTINGSGSPHSKVSRQQT

SEQ ID NO: 1602 - protein, 18 aa, synthetic construct
KTINGSGSPHSKARNKQT

SEQ ID NO: 1603 - protein, 18 aa, synthetic construct
KTINASGSPHSKAQGQQT

SEQ ID NO: 1604 - protein, 18 aa, synthetic construct
KTINGSGSPHSKLRMQQT

SEQ ID NO: 1605 - protein, 18 aa, synthetic construct
KTINGSWSPHMLAQNQQT

SEQ ID NO: 1606 - protein, 18 aa, synthetic construct
KTINGSGSPHSLFPNQQT

SEQ ID NO: 1607 - protein, 18 aa, synthetic construct
KPPLGSGSPHSKAQNQQT

SEQ ID NO: 1608 - protein, 18 aa, synthetic construct
KTINGIASPHRKAQNQQT

SEQ ID NO: 1609 - protein, 18 aa, synthetic construct
KTINGSCSPHSLAQNQQT

SEQ ID NO: 1610 - protein, 18 aa, synthetic construct
KTINGRLSPHFKAQNQQT

SEQ ID NO: 1611 - protein, 18 aa, synthetic construct
KTINGSGSPHSKARMTQT

SEQ ID NO: 1612 - protein, 18 aa, synthetic construct
KTINGSGSPHSKARLQQT

SEQ ID NO: 1613 - protein, 18 aa, synthetic construct
KTINGSGSPHSKWVSQQT

SEQ ID NO: 1614 - protein, 18 aa, synthetic construct
KTINGSGSPHSKKVSQQT

SEQ ID NO: 1615 - protein, 18 aa, synthetic construct
KTINGSGSPHSKAQSYRT

SEQ ID NO: 1616 - protein, 18 aa, synthetic construct
KAFNGSGSPHSKAPNQQT

SEQ ID NO: 1617 - protein, 18 aa, synthetic construct
KTINGSGSPHSKAQYRLT

SEQ ID NO: 1618 - protein, 18 aa, synthetic construct
KTINGSWSPHLVAQNQQT

SEQ ID NO: 1619 - protein, 18 aa, synthetic construct
KTINGSGSPHSWTQNQQT

SEQ ID NO: 1620 - protein, 18 aa, synthetic construct
KTINGSGSPHSKAQSHRT

SEQ ID NO: 1621 - protein, 18 aa, synthetic construct
KGINGSGSPHGKAQNQQT

SEQ ID NO: 1622 - protein, 18 aa, synthetic construct
KTINGSGSPHSKAQNRKL

SEQ ID NO: 1623 - protein, 18 aa, synthetic construct
KTINGRYSPHSKAQNQQT

SEQ ID NO: 1624 - protein, 18 aa, synthetic construct
KTINGSGSPHSKGRSQQT

SEQ ID NO: 1625 - protein, 18 aa, synthetic construct
KTINGSGSPHCVAQNQQT

SEQ ID NO: 1626 - protein, 18 aa, synthetic construct
KTINGSGSPHSKIRPQQT

SEQ ID NO: 1627 - protein, 18 aa, synthetic construct
KTINGSGSPHSKAQSSKT

SEQ ID NO: 1628 - protein, 18 aa, synthetic construct
KTINGSGSPHSKRPFQQT

SEQ ID NO: 1629 - protein, 18 aa, synthetic construct
KTINGSSSPHCLAQNQQT

SEQ ID NO: 1630 - protein, 18 aa, synthetic construct
KTINGTRSPHAKAQNQQT

SEQ ID NO: 1631 - protein, 18 aa, synthetic construct
KTINGSGSPHLLFQNQQT

SEQ ID NO: 1632 - protein, 18 aa, synthetic construct
KTINGRRSPHTKAQNQQT

SEQ ID NO: 1633 - protein, 18 aa, synthetic construct
KTINGSGSPHSKASKQQT

SEQ ID NO: 1634 - protein, 18 aa, synthetic construct
KTINGSGSPHSKAQLGRT

SEQ ID NO: 1635 - protein, 18 aa, synthetic construct
KTINGSGSPHSVFLNQQT

SEQ ID NO: 1636 - protein, 18 aa, synthetic construct
KTINGSGSPHSKSARQQT

SEQ ID NO: 1637 - protein, 18 aa, synthetic construct
KTINGSGSPHSKLRLQQT

SEQ ID NO: 1638 - protein, 18 aa, synthetic construct
KTRKSSGSPHSKAQNQQT

SEQ ID NO: 1639 - protein, 18 aa, synthetic construct
KTINGFRSPHLKAQNQQT

SEQ ID NO: 1640 - protein, 18 aa, synthetic construct
KTINGSGSPHSKRSIQQT

SEQ ID NO: 1641 - protein, 18 aa, synthetic construct
KTINGSGSPHSKGRIQQT

SEQ ID NO: 1642 - protein, 18 aa, synthetic construct
KTINGSRSPHRPAQNQQT

SEQ ID NO: 1643 - protein, 18 aa, synthetic construct
KTINGSGSPHSKLRPQQT

SEQ ID NO: 1644 - protein, 18 aa, synthetic construct
KTINGSGSPHMYAQNQQT

SEQ ID NO: 1645 - protein, 18 aa, synthetic construct
KTINGRTSPHAKAQNQQT

SEQ ID NO: 1646 - protein, 18 aa, synthetic construct
KTINGSGSPHSKAGRGQT

SEQ ID NO: 1647 - protein, 18 aa, synthetic construct
KTINGSGSPHSKLMRQQT

SEQ ID NO: 1648 - protein, 18 aa, synthetic construct
KTINGSGSPHSKANKSQT

SEQ ID NO: 1649 - protein, 18 aa, synthetic construct
KTINGSGSPHSKAVRQQT

SEQ ID NO: 1650 - protein, 18 aa, synthetic construct
KTINGSGSPHSKCLSQQT

SEQ ID NO: 1651 - protein, 18 aa, synthetic construct
KTINGSGSPHSKAQWVLT

SEQ ID NO: 1652 - protein, 18 aa, synthetic construct
KTINGSGSPHSKAQFWVT

SEQ ID NO: 1653 - protein, 18 aa, synthetic construct
KTINGSGSPHSKALCRQT

SEQ ID NO: 1654 - protein, 18 aa, synthetic construct
KEVMGSGSPHSKAQNQQT

SEQ ID NO: 1655 - protein, 18 aa, synthetic construct
KTINGSGSPHSKNTRQQT

SEQ ID NO: 1656 - protein, 18 aa, synthetic construct
KTINGSGSPHTWTQNQQT

SEQ ID NO: 1657 - protein, 18 aa, synthetic construct
KTINGSTSPHWSAQNQQT

SEQ ID NO: 1658 - protein, 18 aa, synthetic construct
KTINGNVSPHRKAQNQQT

SEQ ID NO: 1659 - protein, 18 aa, synthetic construct
KTINGSTSPHLFAQNQQT

SEQ ID NO: 1660 - protein, 18 aa, synthetic construct
KTINGSGSPHSKAQNYRA

SEQ ID NO: 1661 - protein, 18 aa, synthetic construct
KTINGSGSPHSKARGQQT

SEQ ID NO: 1662 - protein, 18 aa, synthetic construct
KTINGSGSPHSKAQNRIR

SEQ ID NO: 1663 - protein, 18 aa, synthetic construct
KTINGSGSPHSKWTLQQT

SEQ ID NO: 1664 - protein, 18 aa, synthetic construct
KTINGSGSPHSKAQMKCT

SEQ ID NO: 1665 - protein, 18 aa, synthetic construct
KTINGSGSPHSLWQNQQT

SEQ ID NO: 1666 - protein, 18 aa, synthetic construct
KTINGSGSPHSKAQLSKT

SEQ ID NO: 1667 - protein, 18 aa, synthetic construct
KTINLIWSPHSKAQNQQT

SEQ ID NO: 1668 - protein, 18 aa, synthetic construct
KTINGSGSPHSKRVLQQT

SEQ ID NO: 1669 - protein, 18 aa, synthetic construct
KTINGSGSPHSKVRVQQT

SEQ ID NO: 1670 - protein, 18 aa, synthetic construct
KTINSRFSPHSKAQNQQT

SEQ ID NO: 1671 - protein, 18 aa, synthetic construct
KRSKGSGSPHSKAQNQQT

SEQ ID NO: 1672 - protein, 18 aa, synthetic construct
KTINGSGSPHRRLQNQQT

SEQ ID NO: 1673 - protein, 18 aa, synthetic construct
KTINGSGSPHSCAQNQQT

SEQ ID NO: 1674 - protein, 18 aa, synthetic construct
KTINGPLSPHRKAQNQQT

SEQ ID NO: 1675 - protein, 18 aa, synthetic construct
KTINGSVSPHLYAQNQQT

SEQ ID NO: 1676 - protein, 18 aa, synthetic construct
KTINGRISPHLKAQNQQT

SEQ ID NO: 1677 - protein, 18 aa, synthetic construct
KTINGSHSPHRKAQNQQT

SEQ ID NO: 1678 - protein, 18 aa, synthetic construct
KTINGSGSPHSKAQVSIT

SEQ ID NO: 1679 - protein, 18 aa, synthetic construct
KTINGSMSPHRRAQNQQT

SEQ ID NO: 1680 - protein, 18 aa, synthetic construct
KTINGRQSPHAKAQNQQT

SEQ ID NO: 1681 - protein, 18 aa, synthetic construct
KTINGSGSPHSKAVWRQT

SEQ ID NO: 1682 - protein, 18 aa, synthetic construct
KQPLGSGSPHSKAQNQQT

SEQ ID NO: 1683 - protein, 18 aa, synthetic construct
KTINGSGSPHSKAQNVKL

SEQ ID NO: 1684 - protein, 18 aa, synthetic construct
KTINGSGSPHSKRGTQQT

SEQ ID NO: 1685 - protein, 18 aa, synthetic construct
KTINGSVSPHYVAQNQQT

SEQ ID NO: 1686 - protein, 18 aa, synthetic construct
KTINGSGSPHSKNLRQQT

SEQ ID NO: 1687 - protein, 18 aa, synthetic construct
KTINGSGSPHSKAQAFRT

SEQ ID NO: 1688 - protein, 18 aa, synthetic construct
KTINGSGSPHSKCSNQQT

SEQ ID NO: 1689 - protein, 18 aa, synthetic construct
KELVGSGSPHSKAQNQQT

SEQ ID NO: 1690 - protein, 18 aa, synthetic construct
KTINGSGSPHSLVFNQQT

SEQ ID NO: 1691 - protein, 18 aa, synthetic construct
KTINGSGSPHSKAQATRT

SEQ ID NO: 1692 - protein, 18 aa, synthetic construct
KTINGTSSPHCKAQNQQT

SEQ ID NO: 1693 - protein, 18 aa, synthetic construct
KTINGSGSPHSKALWRQT

SEQ ID NO: 1694 - protein, 18 aa, synthetic construct
KTINGSGSPHSKAQFSVT

SEQ ID NO: 1695 - protein, 18 aa, synthetic construct
KTINGSGSPHSKLYMQQT

SEQ ID NO: 1696 - protein, 18 aa, synthetic construct
KTINGSLSPHYMAQNQQT

SEQ ID NO: 1697 - protein, 18 aa, synthetic construct
KTINGSGSPHSKAWLMQT

SEQ ID NO: 1698 - protein, 18 aa, synthetic construct
KTINGSGSPHSKSLKQQT

SEQ ID NO: 1699 - protein, 18 aa, synthetic construct
KTINGSGSPHSKAQNTRR

SEQ ID NO: 1700 - protein, 18 aa, synthetic construct
KTINGSGSPHYLLQNQQT

SEQ ID NO: 1701 - protein, 18 aa, synthetic construct
KTINGSGSPHTWSQNQQT

SEQ ID NO: 1702 - protein, 18 aa, synthetic construct
KTINGSGSPHSKTRMQQT

SEQ ID NO: 1703 - protein, 18 aa, synthetic construct
KTINTRPSPHSKAQNQQT

SEQ ID NO: 1704 - protein, 18 aa, synthetic construct
KTINGSGSPHSKAQILVT

SEQ ID NO: 1705 - protein, 18 aa, synthetic construct
KTINGSGSPHSKAQNAKS

SEQ ID NO: 1706 - protein, 18 aa, synthetic construct
KTINGSGSPHSRTYNQQT

SEQ ID NO: 1707 - protein, 18 aa, synthetic construct
KTINGSGSPHSKKGGQQT

SEQ ID NO: 1708 - protein, 18 aa, synthetic construct
KTINGYSSPHRKAQNQQT

SEQ ID NO: 1709 - protein, 18 aa, synthetic construct
KTINGSGSPHWVSQNQQT

SEQ ID NO: 1710 - protein, 18 aa, synthetic construct
KTINGSGSPHSKARLAQT

SEQ ID NO: 1711 - protein, 18 aa, synthetic construct
KTINGMCSPHSKAQNQQT

SEQ ID NO: 1712 - protein, 18 aa, synthetic construct
KTINGSGSPHSKSNKQQT

SEQ ID NO: 1713 - protein, 18 aa, synthetic construct
KTINGSGSPHSKAQFVLT

SEQ ID NO: 1714 - protein, 18 aa, synthetic construct
KTINGSISPHFVAQNQQT

SEQ ID NO: 1715 - protein, 18 aa, synthetic construct
KTINGSGSPHRRMQNQQT

SEQ ID NO: 1716 - protein, 18 aa, synthetic construct
KTINGSGSPHSKAWILQT

SEQ ID NO: 1717 - protein, 18 aa, synthetic construct
KTINGSGSPHSKAQGVKT

SEQ ID NO: 1718 - protein, 18 aa, synthetic construct
KTINGSGSPHSKAQFSLT

SEQ ID NO: 1719 - protein, 18 aa, synthetic construct
KTINMLRSPHSKAQNQQT

SEQ ID NO: 1720 - protein, 18 aa, synthetic construct
KTINGSGSPHSKAQLGKT

SEQ ID NO: 1721 - protein, 18 aa, synthetic construct
KTINGSGSPHSMYLNQQT

SEQ ID NO: 1722 - protein, 18 aa, synthetic construct
KTINGHDSPHVTDQNQQT

SEQ ID NO: 1723 - protein, 18 aa, synthetic construct
KTINGHDSPHKRGQHRQT

SEQ ID NO: 1724 - protein, 18 aa, synthetic construct
KMPEGHDSPHKSGQNQQT

SEQ ID NO: 1725 - protein, 18 aa, synthetic construct
KMEGGHDSPHKSGQNQQT

SEQ ID NO: 1726 - protein, 18 aa, synthetic construct
KMEYGHDSPHKSGQNQQT

SEQ ID NO: 1727 - protein, 18 aa, synthetic construct
KAEWGHDSPHKSGQNQQT

SEQ ID NO: 1728 - protein, 18 aa, synthetic construct
KCEWGHDSPHKSGQNQQT

SEQ ID NO: 1729 - protein, 18 aa, synthetic construct
KANNGQDSPHKSGQNQQT

SEQ ID NO: 1730 - protein, 18 aa, synthetic construct
KTINGHDSPHLCGQNQQT

SEQ ID NO: 1731 - protein, 18 aa, synthetic construct
KIPEGHDSPHKSGQNQQT

SEQ ID NO: 1732 - protein, 18 aa, synthetic construct
KADMGHDSPHKSGQNQQT

SEQ ID NO: 1733 - protein, 18 aa, synthetic construct
KTINGHLSPHYFGQNQQT

SEQ ID NO: 1734 - protein, 18 aa, synthetic construct
KIEYGHDSPHKSGQNQQT

SEQ ID NO: 1735 - protein, 18 aa, synthetic construct
KADYGHDSPHKSGQNQQT

SEQ ID NO: 1736 - protein, 18 aa, synthetic construct
KIETGHDSPHKSGQNQQT

SEQ ID NO: 1737 - protein, 18 aa, synthetic construct
KTINGHDSPHTNGQKQQT

SEQ ID NO: 1738 - protein, 18 aa, synthetic construct
KMEWGHDSPHKSGQNQQT

SEQ ID NO: 1739 - protein, 18 aa, synthetic construct
KTINGHDSPHWLLQNQQT

SEQ ID NO: 1740 - protein, 18 aa, synthetic construct
KCEYGHDSPHKSGQNQQT

SEQ ID NO: 1741 - protein, 18 aa, synthetic construct
KRINGHDSPHKSGQKQQN

SEQ ID NO: 1742 - protein, 18 aa, synthetic construct
KMEIGHDSPHKSGQNQQT

SEQ ID NO: 1743 - protein, 18 aa, synthetic construct
KLEYGHDSPHKSGQNQQT

SEQ ID NO: 1744 - protein, 18 aa, synthetic construct
KADWGHDSPHKSGQNQQT

SEQ ID NO: 1745 - protein, 18 aa, synthetic construct
KIEIGHDSPHKSGQNQQT

SEQ ID NO: 1746 - protein, 18 aa, synthetic construct
KTIKDNDSPHKSGQNQQT

SEQ ID NO: 1747 - protein, 18 aa, synthetic construct
KDIMGHDSPHKSGQNQQT

SEQ ID NO: 1748 - protein, 18 aa, synthetic construct
KFEQGHDSPHKSGQNQQT

SEQ ID NO: 1749 - protein, 18 aa, synthetic construct
KMEFGHDSPHKSGQNQQT

SEQ ID NO: 1750 - protein, 18 aa, synthetic construct
KCDQGHDSPHKSGQNQQT

SEQ ID NO: 1751 - protein, 18 aa, synthetic construct
KLPEGHDSPHKSGQNQQT

SEQ ID NO: 1752 - protein, 18 aa, synthetic construct
KIENGHDSPHKSGQNQQT

SEQ ID NO: 1753 - protein, 18 aa, synthetic construct
KMESGHDSPHKSGQNQQT

SEQ ID NO: 1754 - protein, 18 aa, synthetic construct
KAEIGHDSPHKSGQNQQT

SEQ ID NO: 1755 - protein, 18 aa, synthetic construct
KVEYGHDSPHKSGQNQQT

SEQ ID NO: 1756 - protein, 18 aa, synthetic construct
KIINGHDSPHKSGLTQQT

SEQ ID NO: 1757 - protein, 18 aa, synthetic construct
KTSNGDDSPHKSGRNQQT

SEQ ID NO: 1758 - protein, 18 aa, synthetic construct
KIEVGHDSPHKSGQNQQT

SEQ ID NO: 1759 - protein, 18 aa, synthetic construct
KMEMGHDSPHKSGQNQQT

SEQ ID NO: 1760 - protein, 18 aa, synthetic construct
KAEVGHDSPHKSGQNQQT

SEQ ID NO: 1761 - protein, 18 aa, synthetic construct
KMDAGHDSPHKSGQNQQT

SEQ ID NO: 1762 - protein, 18 aa, synthetic construct
KVEWGHDSPHKSGQNQQT

SEQ ID NO: 1763 - protein, 18 aa, synthetic construct
KAEQGHDSPHKSGQNQQT

SEQ ID NO: 1764 - protein, 18 aa, synthetic construct
KLEWGHDSPHKSGQNQQT

SEQ ID NO: 1765 - protein, 18 aa, synthetic construct
KTINGHPSPHYLGQNQQT

SEQ ID NO: 1766 - protein, 18 aa, synthetic construct
KTINGHLSPHYYGQNQQT

SEQ ID NO: 1767 - protein, 18 aa, synthetic construct
KMELGHDSPHKSGQNQQT

SEQ ID NO: 1768 - protein, 18 aa, synthetic construct
KMETGHDSPHKSGQNQQT

SEQ ID NO: 1769 - protein, 18 aa, synthetic construct
KMEAGHDSPHKSGQNQQT

SEQ ID NO: 1770 - protein, 18 aa, synthetic construct
KTINGHDSPHLLWQNQQT

SEQ ID NO: 1771 - protein, 18 aa, synthetic construct
KTINRQRSPHKSGQNQQT

SEQ ID NO: 1772 - protein, 18 aa, synthetic construct
KIESGHDSPHKSGQNQQT

SEQ ID NO: 1773 - protein, 18 aa, synthetic construct
KTAKDHDSPHKSGQNQQT

SEQ ID NO: 1774 - protein, 18 aa, synthetic construct
KMEVGHDSPHKSGQNQQT

SEQ ID NO: 1775 - protein, 18 aa, synthetic construct
KCEIGHDSPHKSGQNQQT

SEQ ID NO: 1776 - protein, 18 aa, synthetic construct
KATNGHDSPHKSGLNQQT

SEQ ID NO: 1777 - protein, 18 aa, synthetic construct
KMDGGHDSPHKSGQNQQT

SEQ ID NO: 1778 - protein, 18 aa, synthetic construct
KQEVGHDSPHKSGQNQQT

SEQ ID NO: 1779 - protein, 18 aa, synthetic construct
KADQGHDSPHKSGQNQQT

SEQ ID NO: 1780 - protein, 18 aa, synthetic construct
KTINGHESPHKSAQNHQT

SEQ ID NO: 1781 - protein, 18 aa, synthetic construct
KTINGHDSPHKSAQNQWT

SEQ ID NO: 1782 - protein, 18 aa, synthetic construct
KNMNGHDSPHKSGQNTHS

SEQ ID NO: 1783 - protein, 18 aa, synthetic construct
KTPWEHDSPHKSGQNQQT

SEQ ID NO: 1784 - protein, 18 aa, synthetic construct
KTINGHSSPHYFGQNQQT

SEQ ID NO: 1785 - protein, 18 aa, synthetic construct
KIEMGHDSPHKSGQNQQT

SEQ ID NO: 1786 - protein, 18 aa, synthetic construct
KTANEHDSPHKSGQNQQT

SEQ ID NO: 1787 - protein, 18 aa, synthetic construct
KTINGHDSPHKSGRRRQT

SEQ ID NO: 1788 - protein, 18 aa, synthetic construct
KISNGHDSPHKSAQNQQT

SEQ ID NO: 1789 - protein, 18 aa, synthetic construct
KTGNGHDSPHKSGQYQQT

SEQ ID NO: 1790 - protein, 18 aa, synthetic construct
KTINGHYSPHLFGQNQQT

SEQ ID NO: 1791 - protein, 18 aa, synthetic construct
KTINGNYSPHKIGQNQQT

SEQ ID NO: 1792 - protein, 18 aa, synthetic construct
KTINGHDSPHKSRQNDQT

SEQ ID NO: 1793 - protein, 18 aa, synthetic construct
KQQQGHDSPHKSGQNQQT

SEQ ID NO: 1794 - protein, 18 aa, synthetic construct
KTPQDHDSPHKSGQNQQT

SEQ ID NO: 1795 - protein, 18 aa, synthetic construct
KHDWGHDSPHKSGQNQQT

SEQ ID NO: 1796 - protein, 18 aa, synthetic construct
KIEGGHDSPHKSGQNQQT

SEQ ID NO: 1797-1799 - skipped (3 entries)

SEQ ID NO: 1800 - protein, 13 aa, synthetic construct
GHDSPHKSGQNQQ

SEQ ID NO: 1801 - protein, 13 aa, synthetic construct
GSGSPHSKAQNQQ

SEQ ID NO: 1802 - protein, 13 aa, synthetic construct
GSGSPHSKAQNRH

SEQ ID NO: 1803 - protein, 13 aa, synthetic construct
GSGSPHSKVQNQQ

SEQ ID NO: 1804 - protein, 13 aa, synthetic construct
MSGSPHSKAQNQQ

SEQ ID NO: 1805 - protein, 13 aa, synthetic construct
GRGSPHSKAQNQQ

SEQ ID NO: 1806 - protein, 13 aa, synthetic construct
RNGSPHSKAQNQQ

SEQ ID NO: 1807 - protein, 13 aa, synthetic construct
GSGSPHSKARDQQ

SEQ ID NO: 1808 - protein, 13 aa, synthetic construct
GSGSPHSKAPNLQ

SEQ ID NO: 1809 - protein, 13 aa, synthetic construct
TSGSPHSKAQNQQ

SEQ ID NO: 1810 - protein, 13 aa, synthetic construct
GSGSPHSKAHVRQ

SEQ ID NO: 1811 - protein, 13 aa, synthetic construct
GSGSPHSKAPNQH

SEQ ID NO: 1812 - protein, 13 aa, synthetic construct
ISGSPHSKAQNQQ

SEQ ID NO: 1813 - protein, 13 aa, synthetic construct
GPGSPHSKAHNQQ

SEQ ID NO: 1814 - protein, 13 aa, synthetic construct
GSGSPHSKTQSQQ

SEQ ID NO: 1815 - protein, 13 aa, synthetic construct
ESGSPHSKAQNQQ

SEQ ID NO: 1816 - protein, 13 aa, synthetic construct
GSGSPHSKAQPAK

SEQ ID NO: 1817 - protein, 13 aa, synthetic construct
SSGSPHSKAQNQQ

SEQ ID NO: 1818 - protein, 13 aa, synthetic construct
GNGSPHSKAQNQQ

SEQ ID NO: 1819 - protein, 13 aa, synthetic construct
GSGSPHSKSQTQQ

SEQ ID NO: 1820 - protein, 13 aa, synthetic construct
ASGSPHSKAQNQQ

SEQ ID NO: 1821 - protein, 13 aa, synthetic construct
GSGSPHSKAQNLA

SEQ ID NO: 1822 - protein, 13 aa, synthetic construct
GSGSPHSKSQNQL

SEQ ID NO: 1823 - protein, 13 aa, synthetic construct
NSGSPHSKAQNQQ

SEQ ID NO: 1824 - protein, 13 aa, synthetic construct
GSGSPHSKAQGQQ

SEQ ID NO: 1825 - protein, 13 aa, synthetic construct
VSGSPHSKAQNQQ

SEQ ID NO: 1826 - protein, 13 aa, synthetic construct
GSGSPHSKALNRQ

SEQ ID NO: 1827 - protein, 13 aa, synthetic construct
LSGSPHSKAQNQQ

SEQ ID NO: 1828 - protein, 13 aa, synthetic construct
GSGSPHSKAHNQQ

SEQ ID NO: 1829 - protein, 13 aa, synthetic construct
GSGSPHSKTQNQQ

SEQ ID NO: 1830 - protein, 13 aa, synthetic construct
GGGSPHSKAQTQQ

SEQ ID NO: 1831 - protein, 13 aa, synthetic construct
GSGSPHSKAQNPP

SEQ ID NO: 1832 - protein, 13 aa, synthetic construct
GSGSPHSKAQNLQ

SEQ ID NO: 1833 - protein, 13 aa, synthetic construct
GGGSPHSKAQNQQ

SEQ ID NO: 1834 - protein, 13 aa, synthetic construct
GSGSPHSKAQYQQ

SEQ ID NO: 1835 - protein, 13 aa, synthetic construct
GGGSPHSKAQNKQ

SEQ ID NO: 1836 - protein, 13 aa, synthetic construct
GSGSPHSKAQDQE

SEQ ID NO: 1837 - protein, 13 aa, synthetic construct
KSGSPHSKAQNQQ

SEQ ID NO: 1838 - protein, 13 aa, synthetic construct
GGGSPHSKAQNQL

SEQ ID NO: 1839 - protein, 13 aa, synthetic construct
GSGSPHSKAQNHQ

SEQ ID NO: 1840 - protein, 13 aa, synthetic construct
GSGSPHSKAQDQQ

SEQ ID NO: 1841 - protein, 13 aa, synthetic construct
GGGSPHSKSQNQL

SEQ ID NO: 1842 - protein, 13 aa, synthetic construct
GNGSPHSKAQNKQ

SEQ ID NO: 1843 - protein, 13 aa, synthetic construct
GSGSPHSKGHWQQ

SEQ ID NO: 1844 - protein, 13 aa, synthetic construct
GSGSPHSKAPNQQ

SEQ ID NO: 1845 - protein, 13 aa, synthetic construct
GSGSPHSKAQNQL

SEQ ID NO: 1846 - protein, 13 aa, synthetic construct
GSGSPHSKRPEQQ

SEQ ID NO: 1847 - protein, 13 aa, synthetic construct
GSGSPHSKAQRTM

SEQ ID NO: 1848 - protein, 13 aa, synthetic construct
GNGSPHSKAQNQH

SEQ ID NO: 1849 - protein, 13 aa, synthetic construct
HSGSPHSKAQNQQ

SEQ ID NO: 1850 - protein, 13 aa, synthetic construct
GGGSPHSKALNQQ

SEQ ID NO: 1851 - protein, 13 aa, synthetic construct
GSGSPHSKALHQH

SEQ ID NO: 1852 - protein, 13 aa, synthetic construct
GTGSPHSKAQNHQ

SEQ ID NO: 1853 - protein, 13 aa, synthetic construct
GSGSPHSKAQHRI

SEQ ID NO: 1854 - protein, 13 aa, synthetic construct
GSGSPHSKAQYIH

SEQ ID NO: 1855 - protein, 13 aa, synthetic construct
GGGSPHSKAHNQQ

SEQ ID NO: 1856 - protein, 13 aa, synthetic construct
GSGSPHSKAQKFE

SEQ ID NO: 1857 - protein, 13 aa, synthetic construct
ESGSPHSKAQNHQ

SEQ ID NO: 1858 - protein, 13 aa, synthetic construct
GSGSPHSKAQFPS

SEQ ID NO: 1859 - protein, 13 aa, synthetic construct
PSGSPHSKAQNQQ

SEQ ID NO: 1860 - protein, 13 aa, synthetic construct
GNGSPHSKAQNPL

SEQ ID NO: 1861 - protein, 13 aa, synthetic construct
GGGSPHSKAQSQQ

SEQ ID NO: 1862 - protein, 13 aa, synthetic construct
GSGSPHSKAQAIK

SEQ ID NO: 1863 - protein, 13 aa, synthetic construct
GSGSPHSKGQNRQ

SEQ ID NO: 1864 - protein, 13 aa, synthetic construct
GSGSPHSKAQSQQ

SEQ ID NO: 1865 - protein, 13 aa, synthetic construct
GSVSPHGKAQNQL

SEQ ID NO: 1866 - protein, 13 aa, synthetic construct
ASGSPHSKAQNQL

SEQ ID NO: 1867 - protein, 13 aa, synthetic construct
RSGSPHSKAQNQQ

SEQ ID NO: 1868 - protein, 13 aa, synthetic construct
GSGSPHSKAQYQH

SEQ ID NO: 1869 - protein, 13 aa, synthetic construct
GSGSPHTKAQNPQ

SEQ ID NO: 1870 - protein, 13 aa, synthetic construct
GSGSPHSKGQNPP

SEQ ID NO: 1871 - protein, 13 aa, synthetic construct
GSGSPHSKAQHQL

SEQ ID NO: 1872 - protein, 13 aa, synthetic construct
GSGSPHSKAQSPP

SEQ ID NO: 1873 - protein, 13 aa, synthetic construct
GSGSPHSKAQAKL

SEQ ID NO: 1874 - protein, 13 aa, synthetic construct
GSGSPHSKTKSQQ

SEQ ID NO: 1875 - protein, 13 aa, synthetic construct
GSGSPHSKAQDRP

SEQ ID NO: 1876 - protein, 13 aa, synthetic construct
GIGSPHSKAQNLG

SEQ ID NO: 1877 - protein, 13 aa, synthetic construct
GSGSPHSKAQAFH

SEQ ID NO: 1878 - protein, 13 aa, synthetic construct
GSGSPHSKAQKQQ

SEQ ID NO: 1879 - protein, 13 aa, synthetic construct
GSGSPHSKAQNAQ

SEQ ID NO: 1880 - protein, 13 aa, synthetic construct
WSGSPHSKAQNQQ

SEQ ID NO: 1881 - protein, 13 aa, synthetic construct
GSGSPHSKAHNQL

SEQ ID NO: 1882 - protein, 13 aa, synthetic construct
GNGSPHSKAQNHQ

SEQ ID NO: 1883 - protein, 13 aa, synthetic construct
GGGSPHSKAQNLQ

SEQ ID NO: 1884 - protein, 13 aa, synthetic construct
GSGSPHSKAQKLN

SEQ ID NO: 1885 - protein, 13 aa, synthetic construct
GGGSPHSKSQNQH

SEQ ID NO: 1886 - protein, 13 aa, synthetic construct
GSGSPHSKSQNVQ

SEQ ID NO: 1887 - protein, 13 aa, synthetic construct
GSGSPHSKAQAQQ

SEQ ID NO: 1888 - protein, 13 aa, synthetic construct
DSGSPHSKAQNQQ

SEQ ID NO: 1889 - protein, 13 aa, synthetic construct
ASGSPHSKAPNQQ

SEQ ID NO: 1890 - protein, 13 aa, synthetic construct
GSGSPHSKAQTPP

SEQ ID NO: 1891 - protein, 13 aa, synthetic construct
IDGSPHSKAQNQQ

SEQ ID NO: 1892 - protein, 13 aa, synthetic construct
GSGSPHNKAQNHQ

SEQ ID NO: 1893 - protein, 13 aa, synthetic construct
GSGSPHSKAQPPA

SEQ ID NO: 1894 - protein, 13 aa, synthetic construct
GSGSPHSKAQERP

SEQ ID NO: 1895 - protein, 13 aa, synthetic construct
GSGSPHSKAQDLQ

SEQ ID NO: 1896 - protein, 13 aa, synthetic construct
GGGSPHSKAQNPP

SEQ ID NO: 1897 - protein, 13 aa, synthetic construct
GSGSPHSKAQAMH

SEQ ID NO: 1898 - protein, 13 aa, synthetic construct
GSGSPHSKALNQQ

SEQ ID NO: 1899 - protein, 13 aa, synthetic construct
GSGSPHSKAQHPS

SEQ ID NO: 1900 - protein, 13 aa, synthetic construct
GLGSPHSKSQNQQ

SEQ ID NO: 1901 - protein, 13 aa, synthetic construct
GTGSPHSKAQNQQ

SEQ ID NO: 1902 - protein, 13 aa, synthetic construct
GSGSPHSKAPGLQ

SEQ ID NO: 1903 - protein, 13 aa, synthetic construct
GSGSPHSKAQGIR

SEQ ID NO: 1904 - protein, 13 aa, synthetic construct
GSGSPHSKAQAPA

SEQ ID NO: 1905 - protein, 13 aa, synthetic construct
GSGSPHSKSQSQQ

SEQ ID NO: 1906 - protein, 13 aa, synthetic construct
GSGSPHSKAQIPP

SEQ ID NO: 1907 - protein, 13 aa, synthetic construct
GSGSPHSKAQTQL

SEQ ID NO: 1908 - protein, 13 aa, synthetic construct
GSGSPHSKAQAPS

SEQ ID NO: 1909 - protein, 13 aa, synthetic construct
DAGSPHSKAQNQQ

SEQ ID NO: 1910 - protein, 13 aa, synthetic construct
GSGSPHSKGQNQQ

SEQ ID NO: 1911 - protein, 13 aa, synthetic construct
DGGSPHSKAQNQQ

SEQ ID NO: 1912 - protein, 13 aa, synthetic construct
ASGSPHSKAHNQQ

SEQ ID NO: 1913 - protein, 13 aa, synthetic construct
GSGSPHSKAQNTY

SEQ ID NO: 1914 - protein, 13 aa, synthetic construct
GSGSPHSKSQNQH

SEQ ID NO: 1915 - protein, 13 aa, synthetic construct
GGGSPHSKAQDKQ

SEQ ID NO: 1916 - protein, 13 aa, synthetic construct
GSGSPHSKAQNHL

SEQ ID NO: 1917 - protein, 13 aa, synthetic construct
GSGSPHSKAQIGM

SEQ ID NO: 1918 - protein, 13 aa, synthetic construct
GSGSPHSKALNKQ

SEQ ID NO: 1919 - protein, 13 aa, synthetic construct
GGGSPHSKAQNPQ

SEQ ID NO: 1920 - protein, 13 aa, synthetic construct
GTGSPHSKAPNQL

SEQ ID NO: 1921 - protein, 13 aa, synthetic construct
GSGSPHSKAQLQQ

SEQ ID NO: 1922 - protein, 13 aa, synthetic construct
GGGSPHSKAQYQQ

SEQ ID NO: 1923 - protein, 13 aa, synthetic construct
GGGSPHSKAQHQQ

SEQ ID NO: 1924 - protein, 13 aa, synthetic construct
GSGSPHSKAQRMS

SEQ ID NO: 1925 - protein, 13 aa, synthetic construct
GSGSPHSKAQGIL

SEQ ID NO: 1926 - protein, 13 aa, synthetic construct
GSGSPHSKAQDRQ

SEQ ID NO: 1927 - protein, 13 aa, synthetic construct
GSGSPHSKARDWQ

SEQ ID NO: 1928 - protein, 13 aa, synthetic construct
GSGSPHSKAQNTH

SEQ ID NO: 1929 - protein, 13 aa, synthetic construct
GSGSPHSKAQERS

SEQ ID NO: 1930 - protein, 13 aa, synthetic construct
GSGSPHSKAQNYQ

SEQ ID NO: 1931 - protein, 13 aa, synthetic construct
GSGSPHSKAQRTC

SEQ ID NO: 1932 - protein, 13 aa, synthetic construct
GSGSPHSKAQIGH

SEQ ID NO: 1933 - protein, 13 aa, synthetic construct
GSGSPHSKAQGAI

SEQ ID NO: 1934 - protein, 13 aa, synthetic construct
GSGSPHSKAQVPP

SEQ ID NO: 1935 - protein, 13 aa, synthetic construct
GSGSPHSKAQVQQ

SEQ ID NO: 1936 - protein, 13 aa, synthetic construct
GSGSPHSKALMRQ

SEQ ID NO: 1937 - protein, 13 aa, synthetic construct
GSGSPHSKAQYSV

SEQ ID NO: 1938 - protein, 13 aa, synthetic construct
GSGSPHSKVPNLQ

SEQ ID NO: 1939 - protein, 13 aa, synthetic construct
GSGSPHSKAQAIT

SEQ ID NO: 1940 - protein, 13 aa, synthetic construct
GSGSPHSKAQKTL

SEQ ID NO: 1941 - protein, 13 aa, synthetic construct
GSGSPHSKAQNQW

SEQ ID NO: 1942 - protein, 13 aa, synthetic construct
GSGSPHSKAQLHH

SEQ ID NO: 1943 - protein, 13 aa, synthetic construct
GSGSPHSKAQNII

SEQ ID NO: 1944 - protein, 13 aa, synthetic construct
MEGSPHSKAQNQQ

SEQ ID NO: 1945 - protein, 13 aa, synthetic construct
GSGSPHSKAQGHH

SEQ ID NO: 1946 - protein, 13 aa, synthetic construct
GSGSPHSKAQSKV

SEQ ID NO: 1947 - protein, 13 aa, synthetic construct
GSGSPHSKAQLPS

SEQ ID NO: 1948 - protein, 13 aa, synthetic construct
GSGSPHSKAIGKQ

SEQ ID NO: 1949 - protein, 13 aa, synthetic construct
GGGSPHSKSQNQQ

SEQ ID NO: 1950 - protein, 13 aa, synthetic construct
GSGSPHSKAQAIH

SEQ ID NO: 1951 - protein, 13 aa, synthetic construct
GSGSPHSKAQHGL

SEQ ID NO: 1952 - protein, 13 aa, synthetic construct
GSGSPHSKAQFMC

SEQ ID NO: 1953 - protein, 13 aa, synthetic construct
VSGSPHSKAQGQQ

SEQ ID NO: 1954 - protein, 13 aa, synthetic construct
GGGSPHSKAQNQM

SEQ ID NO: 1955 - protein, 13 aa, synthetic construct
GSGSPHSKAQHLQ

SEQ ID NO: 1956 - protein, 13 aa, synthetic construct
ENGSPHSKAQNQQ

SEQ ID NO: 1957 - protein, 13 aa, synthetic construct
GSGSPHSKTQNHQ

SEQ ID NO: 1958 - protein, 13 aa, synthetic construct
GSGSPHSKAQPAR

SEQ ID NO: 1959 - protein, 13 aa, synthetic construct
GSGSPHSKAQSLQ

SEQ ID NO: 1960 - protein, 13 aa, synthetic construct
GSGSPHSKSQSQL

SEQ ID NO: 1961 - protein, 13 aa, synthetic construct
GSASPHSKAHSQQ

SEQ ID NO: 1962 - protein, 13 aa, synthetic construct
GSGSPHSKAQMPS

SEQ ID NO: 1963 - protein, 13 aa, synthetic construct
GSGSPHSKAQGSL

SEQ ID NO: 1964 - protein, 13 aa, synthetic construct
GSGSPHSKSQNQQ

SEQ ID NO: 1965 - protein, 13 aa, synthetic construct
GNGSPHSKSQNQQ

SEQ ID NO: 1966 - protein, 13 aa, synthetic construct
GSGSPHSKAQVPA

SEQ ID NO: 1967 - protein, 13 aa, synthetic construct
GNGSPHSKAQNLQ

SEQ ID NO: 1968 - protein, 13 aa, synthetic construct
GSGSPHSKAQDKQ

SEQ ID NO: 1969 - protein, 13 aa, synthetic construct
GSGSPHSKAHYQQ

SEQ ID NO: 1970 - protein, 13 aa, synthetic construct
GSGSPHSKAQVPS

SEQ ID NO: 1971 - protein, 13 aa, synthetic construct
GGGSPHSKAQNHQ

SEQ ID NO: 1972 - protein, 13 aa, synthetic construct
GSGSPHSKARGEQ

SEQ ID NO: 1973 - protein, 13 aa, synthetic construct
GGGSPHSKAQYQH

SEQ ID NO: 1974 - protein, 13 aa, synthetic construct
GSGSPHSKAPGQQ

SEQ ID NO: 1975 - protein, 13 aa, synthetic construct
KNGSPHSKAQNQQ

SEQ ID NO: 1976 - protein, 13 aa, synthetic construct
GSGSPHSKRLEQQ

SEQ ID NO: 1977 - protein, 13 aa, synthetic construct
GSGSPHSKAQNQS

SEQ ID NO: 1978 - protein, 13 aa, synthetic construct
GSGSPHSKAQKVI

SEQ ID NO: 1979 - protein, 13 aa, synthetic construct
GSGSPHSKAQNND

SEQ ID NO: 1980 - protein, 13 aa, synthetic construct
GSGSPHSKAQSVH

SEQ ID NO: 1981 - protein, 13 aa, synthetic construct
GSGSPHSKAQPLG

SEQ ID NO: 1982 - protein, 13 aa, synthetic construct
KEGSPHSKAQNQQ

SEQ ID NO: 1983 - protein, 13 aa, synthetic construct
GSGSPHSKAHNQE

SEQ ID NO: 1984 - protein, 13 aa, synthetic construct
GSGSPHSKAQIQQ

SEQ ID NO: 1985 - protein, 13 aa, synthetic construct
GSGSPHSKAQVRN

SEQ ID NO: 1986 - protein, 13 aa, synthetic construct
GSGSPHSKAPSNQ

SEQ ID NO: 1987 - protein, 13 aa, synthetic construct
GSGSPHSKAQVGH

SEQ ID NO: 1988 - protein, 13 aa, synthetic construct
GSGSPHSKAQRDI

SEQ ID NO: 1989 - protein, 13 aa, synthetic construct
GSGSPHSKAQMPN

SEQ ID NO: 1990 - protein, 13 aa, synthetic construct
AIGSPHSKAQNQQ

SEQ ID NO: 1991 - protein, 13 aa, synthetic construct
GSGSPHSKARGLQ

SEQ ID NO: 1992 - protein, 13 aa, synthetic construct
GSGSPHSKLQKQQ

SEQ ID NO: 1993 - protein, 13 aa, synthetic construct
GSGSPHSKAPSLQ

SEQ ID NO: 1994 - protein, 13 aa, synthetic construct
GSGSPHSKAQRDQ

SEQ ID NO: 1995 - protein, 13 aa, synthetic construct
GSGSPHSKNRDQQ

SEQ ID NO: 1996 - protein, 13 aa, synthetic construct
GSGSPHSKAQAKG

SEQ ID NO: 1997 - protein, 13 aa, synthetic construct
GSGSPHSKAQSAH

SEQ ID NO: 1998 - protein, 13 aa, synthetic construct
GNGSPHSKSQNQH

SEQ ID NO: 1999 - protein, 13 aa, synthetic construct
GSGSPHSKSQNHQ

SEQ ID NO: 2000 - protein, 13 aa, synthetic construct
RSGSPHSKAQDQQ

SEQ ID NO: 2001 - protein, 13 aa, synthetic construct
GSGSPHSKAQSTM

SEQ ID NO: 2002 - protein, 13 aa, synthetic construct
GSGSPHSKAQREM

SEQ ID NO: 2003 - protein, 13 aa, synthetic construct
GGGSPHSKSQNRQ

SEQ ID NO: 2004 - protein, 13 aa, synthetic construct
GSGSPHSKAQYRA

SEQ ID NO: 2005 - protein, 13 aa, synthetic construct
GGGSPHSKAQRQQ

SEQ ID NO: 2006 - protein, 13 aa, synthetic construct
GSGSPHSKNQWQQ

SEQ ID NO: 2007 - protein, 13 aa, synthetic construct
GSGSPHSKAQRMN

SEQ ID NO: 2008 - protein, 13 aa, synthetic construct
GSGSPHAKAQNHQ

SEQ ID NO: 2009 - protein, 13 aa, synthetic construct
GSGSPHSKAGDSQ

SEQ ID NO: 2010 - protein, 13 aa, synthetic construct
GSGSPHSKLKSQQ

SEQ ID NO: 2011 - protein, 13 aa, synthetic construct
GSGSPHSKAQKIS

SEQ ID NO: 2012 - protein, 13 aa, synthetic construct
GSGSPHSKAPSMQ

SEQ ID NO: 2013 - protein, 13 aa, synthetic construct
GSGSPHSKASPRQ

SEQ ID NO: 2014 - protein, 13 aa, synthetic construct
GSGSPHSKRMEQQ

SEQ ID NO: 2015 - protein, 13 aa, synthetic construct
GSGSPHSKAQYQN

SEQ ID NO: 2016 - protein, 13 aa, synthetic construct
GSGSPHARMQNQQ

SEQ ID NO: 2017 - protein, 13 aa, synthetic construct
GSGSPHVKSQNQQ

SEQ ID NO: 2018 - protein, 13 aa, synthetic construct
GQDSPHKSGQNQQ

SEQ ID NO: 2019 - protein, 13 aa, synthetic construct
GSGSPHASRQNQQ

SEQ ID NO: 2020 - protein, 13 aa, synthetic construct
GSGSPHASRQNKQ

SEQ ID NO: 2021 - protein, 13 aa, synthetic construct
GSGSPHVKIQNQQ

SEQ ID NO: 2022 - protein, 13 aa, synthetic construct
GSGSPHSKAKNQQ

SEQ ID NO: 2023 - protein, 13 aa, synthetic construct
GSGSPHKKNQNQQ

SEQ ID NO: 2024 - protein, 13 aa, synthetic construct
GSGSPHVRMQNQQ

SEQ ID NO: 2025 - protein, 13 aa, synthetic construct
GSGSPHASRQKQQ

SEQ ID NO: 2026 - protein, 13 aa, synthetic construct
GHSSPHRSGQNQQ

SEQ ID NO: 2027 - protein, 13 aa, synthetic construct
GSGSPHTRGQNQQ

SEQ ID NO: 2028 - protein, 13 aa, synthetic construct
CSGSPHSKAQNQQ

SEQ ID NO: 2029 - protein, 13 aa, synthetic construct
GSGSPHRKAQNQQ

SEQ ID NO: 2030 - protein, 13 aa, synthetic construct
GSGSPHSKAQNKQ

SEQ ID NO: 2031 - protein, 13 aa, synthetic construct
GSGSPHSKAQTQQ

SEQ ID NO: 2032 - protein, 13 aa, synthetic construct
CSGSPHKTSQNQQ

SEQ ID NO: 2033 - protein, 13 aa, synthetic construct
CSHSPHKSGQNQQ

SEQ ID NO: 2034 - protein, 13 aa, synthetic construct
GQSSPHRSGQNQQ

SEQ ID NO: 2035 - protein, 13 aa, synthetic construct
GRGSPHASRQNQQ

SEQ ID NO: 2036 - protein, 13 aa, synthetic construct
GSGSPHASRKNQQ

SEQ ID NO: 2037 - protein, 13 aa, synthetic construct
GSGSPHASRQNQH

SEQ ID NO: 2038 - protein, 13 aa, synthetic construct
GSGSPHKFGKNQQ

SEQ ID NO: 2039 - protein, 13 aa, synthetic construct
GSGSPHKFGQKQQ

SEQ ID NO: 2040 - protein, 13 aa, synthetic construct
GSGSPHKFGQNQQ

SEQ ID NO: 2041 - protein, 13 aa, synthetic construct
GSGSPHKIGQNQQ

SEQ ID NO: 2042 - protein, 13 aa, synthetic construct
GSGSPHKLGQNQQ

SEQ ID NO: 2043 - protein, 13 aa, synthetic construct
GSGSPHKTSKNQQ

SEQ ID NO: 2044 - protein, 13 aa, synthetic construct
GSGSPHKTSQKQQ

SEQ ID NO: 2045 - protein, 13 aa, synthetic construct
GSGSPHKTSQNQQ

SEQ ID NO: 2046 - protein, 13 aa, synthetic construct
GSGSPHKTTQNQQ

SEQ ID NO: 2047 - protein, 13 aa, synthetic construct
GSGSPHKTYQNQQ

SEQ ID NO: 2048 - protein, 13 aa, synthetic construct
GSGSPHKYGQNQQ

SEQ ID NO: 2049 - protein, 13 aa, synthetic construct
GSGSPHSKAQHQQ

SEQ ID NO: 2050 - protein, 13 aa, synthetic construct
GSGSPHSKDQNQQ

SEQ ID NO: 2051 - protein, 13 aa, synthetic construct
GSGSPHSKPQNQQ

SEQ ID NO: 2052 - protein, 13 aa, synthetic construct
GSGSPHVRGQKQQ

SEQ ID NO: 2053 - protein, 13 aa, synthetic construct
GSGSPHVRGQNKQ

SEQ ID NO: 2054 - protein, 13 aa, synthetic construct
GSHSPHKRGQNQQ

SEQ ID NO: 2055 - protein, 13 aa, synthetic construct
GSHSPHKSGQKQQ

SEQ ID NO: 2056 - protein, 13 aa, synthetic construct
GSHSPHKSGQNQQ

SEQ ID NO: 2057 - protein, 13 aa, synthetic construct
VSGSPHASRQNQQ

SEQ ID NO: 2058 - protein, 13 aa, synthetic construct
VSGSPHGARQNQQ

SEQ ID NO: 2059 - protein, 13 aa, synthetic construct
VSGSPHKFGQNQQ

SEQ ID NO: 2060 - protein, 13 aa, synthetic construct
GSGSPHSKAQYYV

SEQ ID NO: 2061 - protein, 13 aa, synthetic construct
GSGSPHSKLRRQQ

SEQ ID NO: 2062 - protein, 13 aa, synthetic construct
GSGSPHSKAGCGQ

SEQ ID NO: 2063 - protein, 13 aa, synthetic construct
GSGSPHSRAQNQQ

SEQ ID NO: 2064 - protein, 13 aa, synthetic construct
GSGSPHSKRLRQQ

SEQ ID NO: 2065 - protein, 13 aa, synthetic construct
GSGSPHSLRRNQQ

SEQ ID NO: 2066 - protein, 13 aa, synthetic construct
GSGSPHSRGRNQQ

SEQ ID NO: 2067 - protein, 13 aa, synthetic construct
GSGSPHSSRRNQQ

SEQ ID NO: 2068 - protein, 13 aa, synthetic construct
GSGSPHSKAFRLQ

SEQ ID NO: 2069 - protein, 13 aa, synthetic construct
GSCSPHRKAQNQQ

SEQ ID NO: 2070 - protein, 13 aa, synthetic construct
GSGSPHFLRQNQQ

SEQ ID NO: 2071 - protein, 13 aa, synthetic construct
GSGSPHSLRFNQQ

SEQ ID NO: 2072 - protein, 13 aa, synthetic construct
GSGSPHSKWLLQQ

SEQ ID NO: 2073 - protein, 13 aa, synthetic construct
GSGSPHSKRRLQQ

SEQ ID NO: 2074 - protein, 13 aa, synthetic construct
GSGSPHSKAQRKL

SEQ ID NO: 2075 - protein, 13 aa, synthetic construct
GSGSPHSKALRRQ

SEQ ID NO: 2076 - protein, 13 aa, synthetic construct
GSGSPHSKAQRLR

SEQ ID NO: 2077 - protein, 13 aa, synthetic construct
GSGSPHSKAQRRL

SEQ ID NO: 2078 - protein, 13 aa, synthetic construct
GSGSPHSKARRQQ

SEQ ID NO: 2079 - protein, 13 aa, synthetic construct
GSGSPHSKARRLQ

SEQ ID NO: 2080 - protein, 13 aa, synthetic construct
GSGSPHSKSRRQQ

SEQ ID NO: 2081 - protein, 13 aa, synthetic construct
GLLSPHWKAQNQQ

SEQ ID NO: 2082 - protein, 13 aa, synthetic construct
GSGSPHSKARLRQ

SEQ ID NO: 2083 - protein, 13 aa, synthetic construct
GSGSPHSKASKRQ

SEQ ID NO: 2084 - protein, 13 aa, synthetic construct
GSGSPHVRRQNQQ

SEQ ID NO: 2085 - protein, 13 aa, synthetic construct
GSGSPHSKAQLYR

SEQ ID NO: 2086 - protein, 13 aa, synthetic construct
GSGSPHSKAQLTV

SEQ ID NO: 2087 - protein, 13 aa, synthetic construct
GHDSPHKRGQHRQ

SEQ ID NO: 2088 - protein, 13 aa, synthetic construct
GHDSPHKSGQKQQ

SEQ ID NO: 2089 - protein, 13 aa, synthetic construct
GHDSPHKSGLTQQ

SEQ ID NO: 2090 - protein, 13 aa, synthetic construct
GDDSPHKSGRNQQ

SEQ ID NO: 2091 - protein, 13 aa, synthetic construct
GHDSPHKSGLNQQ

SEQ ID NO: 2092 - protein, 13 aa, synthetic construct
GHESPHKSAQNHQ

SEQ ID NO: 2093 - protein, 13 aa, synthetic construct
GHDSPHKSAQNQW

SEQ ID NO: 2094 - protein, 13 aa, synthetic construct
GHDSPHKSGQNTH

SEQ ID NO: 2095 - protein, 13 aa, synthetic construct
GHDSPHKSGRRRQ

SEQ ID NO: 2096 - protein, 13 aa, synthetic construct
GHDSPHKSAQNQQ

SEQ ID NO: 2097 - protein, 13 aa, synthetic construct
GHDSPHKSGQYQQ

SEQ ID NO: 2098 - protein, 13 aa, synthetic construct
GNYSPHKIGQNQQ

SEQ ID NO: 2099 - protein, 13 aa, synthetic construct
GHDSPHKSRQNDQ

SEQ ID NO: 2100 - protein, 13 aa, synthetic construct
GHDSPHKSGQIRQ

SEQ ID NO: 2101 - protein, 13 aa, synthetic construct
GHDSPHKIGQNQH

SEQ ID NO: 2102 - protein, 13 aa, synthetic construct
GYDSPHKSGQKQQ

SEQ ID NO: 2103 - protein, 13 aa, synthetic construct
GHDSPHKSGQSVQ

SEQ ID NO: 2104 - protein, 13 aa, synthetic construct
GHESPHKSGRSQQ

SEQ ID NO: 2105 - protein, 13 aa, synthetic construct
GHDSPHKSGQNKL

SEQ ID NO: 2106 - protein, 13 aa, synthetic construct
GHDSPHKTGQNQQ

SEQ ID NO: 2107 - protein, 13 aa, synthetic construct
GRGSPHKRGQNQQ

SEQ ID NO: 2108 - protein, 13 aa, synthetic construct
GSGSPHTKAQNPP

SEQ ID NO: 2109 - protein, 13 aa, synthetic construct
GQDSPHKSGQHQQ

SEQ ID NO: 2110 - protein, 13 aa, synthetic construct
GHDSPHKSGQIQH

SEQ ID NO: 2111 - protein, 13 aa, synthetic construct
GHDSPHKSGPRQQ

SEQ ID NO: 2112 - protein, 13 aa, synthetic construct
GHDSPHKSGHTQQ

SEQ ID NO: 2113 - protein, 13 aa, synthetic construct
GHDSPHKSGQRQH

SEQ ID NO: 2114 - protein, 13 aa, synthetic construct
GSGSPHTKAQNQQ

SEQ ID NO: 2115 - protein, 13 aa, synthetic construct
GHDSPHKSAQSQQ

SEQ ID NO: 2116 - protein, 13 aa, synthetic construct
GHESPHKSGQNQQ

SEQ ID NO: 2117 - protein, 13 aa, synthetic construct
GHDSPHKSLQNQQ

SEQ ID NO: 2118 - protein, 13 aa, synthetic construct
GHGSPHSKAQNPQ

SEQ ID NO: 2119 - protein, 13 aa, synthetic construct
GHDSPHKSGRNQE

SEQ ID NO: 2120 - protein, 13 aa, synthetic construct
GHDSPHKSGQTQL

SEQ ID NO: 2121 - protein, 13 aa, synthetic construct
GHDSPHKSEKNQQ

SEQ ID NO: 2122 - protein, 13 aa, synthetic construct
GRDSPHKSGQDQQ

SEQ ID NO: 2123 - protein, 13 aa, synthetic construct
GHDSPHKTGHNQQ

SEQ ID NO: 2124 - protein, 13 aa, synthetic construct
GYDSPHKSGQTQQ

SEQ ID NO: 2125 - protein, 13 aa, synthetic construct
GHESPHKSGQTQQ

SEQ ID NO: 2126 - protein, 13 aa, synthetic construct
GHDSPHKSGQSKQ

SEQ ID NO: 2127 - protein, 13 aa, synthetic construct
GHDSPHKTGQNQP

SEQ ID NO: 2128 - protein, 13 aa, synthetic construct
GHDSPHKSGQSPQ

SEQ ID NO: 2129 - protein, 13 aa, synthetic construct
GNDSPHKSVQNQQ

SEQ ID NO: 2130 - protein, 13 aa, synthetic construct
GHDSPHKSAQNYQ

SEQ ID NO: 2131 - protein, 13 aa, synthetic construct
GSASPHSKALNQQ

SEQ ID NO: 2132 - protein, 13 aa, synthetic construct
GHESPHKSAQNRQ

SEQ ID NO: 2133 - protein, 13 aa, synthetic construct
GQDSPHKIGQNQQ

SEQ ID NO: 2134 - protein, 13 aa, synthetic construct
GHDSPHKSGQNHL

SEQ ID NO: 2135 - protein, 13 aa, synthetic construct
GHDSPHKSGQYQH

SEQ ID NO: 2136 - protein, 13 aa, synthetic construct
GNDSPHKSVQNHQ

SEQ ID NO: 2137 - protein, 13 aa, synthetic construct
GHDSPHKSGQNQW

SEQ ID NO: 2138 - protein, 13 aa, synthetic construct
GHDSPHKSVQNQH

SEQ ID NO: 2139 - protein, 13 aa, synthetic construct
GHDSPHKSGQNQH

SEQ ID NO: 2140 - protein, 13 aa, synthetic construct
GHDSPHKSGQTRQ

SEQ ID NO: 2141 - protein, 13 aa, synthetic construct
GHDSPHKSGQNLH

SEQ ID NO: 2142 - protein, 13 aa, synthetic construct
GHDSPHKSAQNQE

SEQ ID NO: 2143 - protein, 13 aa, synthetic construct
GHDSPHKSGQHLQ

SEQ ID NO: 2144 - protein, 13 aa, synthetic construct
GHDSPHKSRLNQP

SEQ ID NO: 2145 - protein, 13 aa, synthetic construct
GQDSPHKSGQNQD

SEQ ID NO: 2146 - protein, 13 aa, synthetic construct
GHDSPHKSGRNQQ

SEQ ID NO: 2147 - protein, 13 aa, synthetic construct
GHDSPHKSGQNLL

SEQ ID NO: 2148 - protein, 13 aa, synthetic construct
GHDSPHKSGQLVI

SEQ ID NO: 2149 - protein, 13 aa, synthetic construct
GHDSPHKSRQSQQ

SEQ ID NO: 2150 - protein, 13 aa, synthetic construct
GHDSPHKSGRTQE

SEQ ID NO: 2151 - protein, 13 aa, synthetic construct
GHDSPHKSVQTHQ

SEQ ID NO: 2152 - protein, 13 aa, synthetic construct
GHDSPHKSGQNQP

SEQ ID NO: 2153 - protein, 13 aa, synthetic construct
GHDSPHKSGQTQQ

SEQ ID NO: 2154 - protein, 13 aa, synthetic construct
GPDSPHKIGQNQQ

SEQ ID NO: 2155 - protein, 13 aa, synthetic construct
GHDSPHKSVQNQQ

SEQ ID NO: 2156 - protein, 13 aa, synthetic construct
GHDSPHKSRQDQH

SEQ ID NO: 2157 - protein, 13 aa, synthetic construct
GPDSPHKSGQKQQ

SEQ ID NO: 2158 - protein, 13 aa, synthetic construct
GHDSPHKSRQSQH

SEQ ID NO: 2159 - protein, 13 aa, synthetic construct
GHDSPHKSVQNQL

SEQ ID NO: 2160 - protein, 13 aa, synthetic construct
GYDSPHKSGQYQH

SEQ ID NO: 2161 - protein, 13 aa, synthetic construct
GHDSPHKSRQNQQ

SEQ ID NO: 2162 - protein, 13 aa, synthetic construct
GHDSPHKSWVRQQ

SEQ ID NO: 2163 - protein, 13 aa, synthetic construct
GHESPHKSGQNQH

SEQ ID NO: 2164 - protein, 13 aa, synthetic construct
GHDSPHKIGHNQQ

SEQ ID NO: 2165 - protein, 13 aa, synthetic construct
GHDSPHKSNAWQQ

SEQ ID NO: 2166 - protein, 13 aa, synthetic construct
GHDSPHKSGQSVP

SEQ ID NO: 2167 - protein, 13 aa, synthetic construct
GHESPHKSGQNIQ

SEQ ID NO: 2168 - protein, 13 aa, synthetic construct
GHDSPHKSVQNHL

SEQ ID NO: 2169 - protein, 13 aa, synthetic construct
GHDSPHKIGLDQQ

SEQ ID NO: 2170 - protein, 13 aa, synthetic construct
ASGSPHSKAQHQQ

SEQ ID NO: 2171 - protein, 13 aa, synthetic construct
GHDSPHKRGPDQQ

SEQ ID NO: 2172 - protein, 13 aa, synthetic construct
GMGSPHSKTQNQQ

SEQ ID NO: 2173 - protein, 13 aa, synthetic construct
GHDSPHKSGESQQ

SEQ ID NO: 2174 - protein, 13 aa, synthetic construct
GHDSPHKHGQNHQ

SEQ ID NO: 2175 - protein, 13 aa, synthetic construct
GTGSPHSKAQNQL

SEQ ID NO: 2176 - protein, 13 aa, synthetic construct
GHDSPHKSVQNKQ

SEQ ID NO: 2177 - protein, 13 aa, synthetic construct
GQVSPHKSGQNQQ

SEQ ID NO: 2178 - protein, 13 aa, synthetic construct
GHDSPHKSGQRQL

SEQ ID NO: 2179 - protein, 13 aa, synthetic construct
GHDSPHKIGQNQL

SEQ ID NO: 2180 - protein, 13 aa, synthetic construct
GHDSPHKSGQIIV

SEQ ID NO: 2181 - protein, 13 aa, synthetic construct
GYDSPHKSGQKQS

SEQ ID NO: 2182 - protein, 13 aa, synthetic construct
GNGSPHSKAQNQE

SEQ ID NO: 2183 - protein, 13 aa, synthetic construct
GDDSPHKSVQNQQ

SEQ ID NO: 2184 - protein, 13 aa, synthetic construct
GHDSPHKSVQSHQ

SEQ ID NO: 2185 - protein, 13 aa, synthetic construct
GHDSPHKSGQFVV

SEQ ID NO: 2186 - protein, 13 aa, synthetic construct
GHDSPHKSRQNLQ

SEQ ID NO: 2187 - protein, 13 aa, synthetic construct
GHNSPHKSGQNQE

SEQ ID NO: 2188 - protein, 13 aa, synthetic construct
GHDSPHKSGQSQP

SEQ ID NO: 2189 - protein, 13 aa, synthetic construct
GHESPHKSGQNEQ

SEQ ID NO: 2190 - protein, 13 aa, synthetic construct
GHDSPHKSGQNQL

SEQ ID NO: 2191 - protein, 13 aa, synthetic construct
GHDSPHKSAQNLL

SEQ ID NO: 2192 - protein, 13 aa, synthetic construct
ASGSPHSKAINQQ

SEQ ID NO: 2193 - protein, 13 aa, synthetic construct
GNGSPHKRGQNQQ

SEQ ID NO: 2194 - protein, 13 aa, synthetic construct
GHDSPHKSGQSLQ

SEQ ID NO: 2195 - protein, 13 aa, synthetic construct
GHDSPHKSAQNHQ

SEQ ID NO: 2196 - protein, 13 aa, synthetic construct
GHDSPHKSGRNRQ

SEQ ID NO: 2197 - protein, 13 aa, synthetic construct
GHDSPHKYGQNEQ

SEQ ID NO: 2198 - protein, 13 aa, synthetic construct
GNGSPHSKAPNLQ

SEQ ID NO: 2199 - protein, 13 aa, synthetic construct
GHDSPHKSQQNQQ

SEQ ID NO: 2200 - protein, 13 aa, synthetic construct
GHDSPHKSVQSKQ

SEQ ID NO: 2201 - protein, 13 aa, synthetic construct
GNDSPHKIGHNQQ

SEQ ID NO: 2202 - protein, 13 aa, synthetic construct
GGGSPHSKAQDQQ

SEQ ID NO: 2203 - protein, 13 aa, synthetic construct
GQDSPHKSGQNPL

SEQ ID NO: 2204 - protein, 13 aa, synthetic construct
ASGSPHSKAQNHQ

SEQ ID NO: 2205 - protein, 13 aa, synthetic construct
GHDSPHKSGRDQK

SEQ ID NO: 2206 - protein, 13 aa, synthetic construct
GHDSPHKSVHNQQ

SEQ ID NO: 2207 - protein, 13 aa, synthetic construct
GHDSPHKSGQWKR

SEQ ID NO: 2208 - protein, 13 aa, synthetic construct
GSGSPHSKAENRQ

SEQ ID NO: 2209 - protein, 13 aa, synthetic construct
GHDSPHKSGQSQQ

SEQ ID NO: 2210 - protein, 13 aa, synthetic construct
GHDSPHKSRQAQQ

SEQ ID NO: 2211 - protein, 13 aa, synthetic construct
GHDSPHKSVQNHQ

SEQ ID NO: 2212 - protein, 13 aa, synthetic construct
GHDSPHKSKQNQQ

SEQ ID NO: 2213 - protein, 13 aa, synthetic construct
GHDSPHKSAQNQL

SEQ ID NO: 2214 - protein, 13 aa, synthetic construct
GHDSPHKSGQTQP

SEQ ID NO: 2215 - protein, 13 aa, synthetic construct
GHDSPHKLWINQQ

SEQ ID NO: 2216 - protein, 13 aa, synthetic construct
GPDSPHKSGQNQQ

SEQ ID NO: 2217 - protein, 13 aa, synthetic construct
GHDSPHKSVQKQL

SEQ ID NO: 2218 - protein, 13 aa, synthetic construct
GHPSPHWKGQNQQ

SEQ ID NO: 2219 - protein, 13 aa, synthetic construct
GHDSPHKSGRNQL

SEQ ID NO: 2220 - protein, 13 aa, synthetic construct
GSGSPHSKVQDQQ

SEQ ID NO: 2221 - protein, 13 aa, synthetic construct
GHDSPHKMGRNQQ

SEQ ID NO: 2222 - protein, 13 aa, synthetic construct
GHDSPHKSGISIQ

SEQ ID NO: 2223 - protein, 13 aa, synthetic construct
GHDSPHKSVQNLQ

SEQ ID NO: 2224 - protein, 13 aa, synthetic construct
GHDSPHKMAHNQQ

SEQ ID NO: 2225 - protein, 13 aa, synthetic construct
GHDSPHKHGQNQQ

SEQ ID NO: 2226 - protein, 13 aa, synthetic construct
GHDSPHKSVQSQQ

SEQ ID NO: 2227 - protein, 13 aa, synthetic construct
GHDSPHKSGQTVC

SEQ ID NO: 2228 - protein, 13 aa, synthetic construct
GQDSPHKSGQYQQ

SEQ ID NO: 2229 - protein, 13 aa, synthetic construct
GHDSPHKSGQQIM

SEQ ID NO: 2230 - protein, 13 aa, synthetic construct
GHDSPHKSRQNEQ

SEQ ID NO: 2231 - protein, 13 aa, synthetic construct
GHDSPHKSGLNHQ

SEQ ID NO: 2232 - protein, 13 aa, synthetic construct
GYDSPHKSGQNQQ

SEQ ID NO: 2233 - protein, 13 aa, synthetic construct
GHDSPHKSGQNLQ

SEQ ID NO: 2234 - protein, 13 aa, synthetic construct
GHDSPHKSRQDQQ

SEQ ID NO: 2235 - protein, 13 aa, synthetic construct
GDDSPHKSGQKQL

SEQ ID NO: 2236 - protein, 13 aa, synthetic construct
GSGSPHSKAQNQA

SEQ ID NO: 2237 - protein, 13 aa, synthetic construct
GDDSPHKSGHNQQ

SEQ ID NO: 2238 - protein, 13 aa, synthetic construct
GHDSPHKSGQMIH

SEQ ID NO: 2239 - protein, 13 aa, synthetic construct
GHDSPHKSGRNHQ

SEQ ID NO: 2240 - protein, 13 aa, synthetic construct
GHDSPHKSVQNRQ

SEQ ID NO: 2241 - protein, 13 aa, synthetic construct
GHDSPHKSGQKMN

SEQ ID NO: 2242 - protein, 16 aa, synthetic construct
TINGSGSPHSKAQNQQ

SEQ ID NO: 2243 - protein, 16 aa, synthetic construct
TINGHDSPHKSGQNQQ

SEQ ID NO: 2244 - protein, 16 aa, synthetic construct
TIIGSGSPHSKAQNRH

SEQ ID NO: 2245 - protein, 16 aa, synthetic construct
TFPGSGSPHSKVQNQQ

SEQ ID NO: 2246 - protein, 16 aa, synthetic construct
TEKMSGSPHSKAQNQQ

SEQ ID NO: 2247 - protein, 16 aa, synthetic construct
EINGRGSPHSKAQNQQ

SEQ ID NO: 2248 - protein, 16 aa, synthetic construct
TVNRNGSPHSKAQNQQ

SEQ ID NO: 2249 - protein, 16 aa, synthetic construct
TVNGSGSPHSKARDQQ

SEQ ID NO: 2250 - protein, 16 aa, synthetic construct
TFNGSGSPHSKAPNLQ

SEQ ID NO: 2251 - protein, 16 aa, synthetic construct
TEKTSGSPHSKAQNQQ

SEQ ID NO: 2252 - protein, 16 aa, synthetic construct
TINGSGSPHSKAHVRQ

SEQ ID NO: 2253 - protein, 16 aa, synthetic construct
TVNGSGSPHSKAPNQH

SEQ ID NO: 2254 - protein, 16 aa, synthetic construct
TEKISGSPHSKAQNQQ

SEQ ID NO: 2255 - protein, 16 aa, synthetic construct
TINGPGSPHSKAHNQQ

SEQ ID NO: 2256 - protein, 16 aa, synthetic construct
TVNGSGSPHSKTQSQQ

SEQ ID NO: 2257 - protein, 16 aa, synthetic construct
SINESGSPHSKAQNQQ

SEQ ID NO: 2258 - protein, 16 aa, synthetic construct
TERTSGSPHSKAQNQQ

SEQ ID NO: 2259 - protein, 16 aa, synthetic construct
TINGSGSPHSKAQPAK

SEQ ID NO: 2260 - protein, 16 aa, synthetic construct
TEKSSGSPHSKAQNQQ

SEQ ID NO: 2261 - protein, 16 aa, synthetic construct
TSYGNGSPHSKAQNQQ

SEQ ID NO: 2262 - protein, 16 aa, synthetic construct
TEKGSGSPHSKAQNQQ

SEQ ID NO: 2263 - protein, 16 aa, synthetic construct
TINGSGSPHSKSQTQQ

SEQ ID NO: 2264 - protein, 16 aa, synthetic construct
TERISGSPHSKAQNQQ

SEQ ID NO: 2265 - protein, 16 aa, synthetic construct
TERASGSPHSKAQNQQ

SEQ ID NO: 2266 - protein, 16 aa, synthetic construct
ELHGSGSPHSKAQNQQ

SEQ ID NO: 2267 - protein, 16 aa, synthetic construct
AINGSGSPHSKAQNLA

SEQ ID NO: 2268 - protein, 16 aa, synthetic construct
TVNGSGSPHSKSQNQL

SEQ ID NO: 2269 - protein, 16 aa, synthetic construct
TERNSGSPHSKAQNQQ

SEQ ID NO: 2270 - protein, 16 aa, synthetic construct
SVNGNGSPHSKAQNQQ

SEQ ID NO: 2271 - protein, 16 aa, synthetic construct
TFNGSGSPHSKAQGQQ

SEQ ID NO: 2272 - protein, 16 aa, synthetic construct
TERVSGSPHSKAQNQQ

SEQ ID NO: 2273 - protein, 16 aa, synthetic construct
TINGSGSPHSKALNRQ

SEQ ID NO: 2274 - protein, 16 aa, synthetic construct
TERLSGSPHSKAQNQQ

SEQ ID NO: 2275 - protein, 16 aa, synthetic construct
TDNGSGSPHSKAHNQQ

SEQ ID NO: 2276 - protein, 16 aa, synthetic construct
TFHGSGSPHSKTQNQQ

SEQ ID NO: 2277 - protein, 16 aa, synthetic construct
TINGGGSPHSKAQTQQ

SEQ ID NO: 2278 - protein, 16 aa, synthetic construct
TSNGSGSPHSKAQNPP

SEQ ID NO: 2279 - protein, 16 aa, synthetic construct
TINGSGSPHSKAQNLQ

SEQ ID NO: 2280 - protein, 16 aa, synthetic construct
TVHGNGSPHSKAQNQQ

SEQ ID NO: 2281 - protein, 16 aa, synthetic construct
TINGGGSPHSKAQNQQ

SEQ ID NO: 2282 - protein, 16 aa, synthetic construct
TENMSGSPHSKAQNQQ

SEQ ID NO: 2283 - protein, 16 aa, synthetic construct
TENVSGSPHSKAQNQQ

SEQ ID NO: 2284 - protein, 16 aa, synthetic construct
TSSGSGSPHSKAQYQQ

SEQ ID NO: 2285 - protein, 16 aa, synthetic construct
TIDGGGSPHSKAQNKQ

SEQ ID NO: 2286 - protein, 16 aa, synthetic construct
TEKVSGSPHSKAQNQQ

SEQ ID NO: 2287 - protein, 16 aa, synthetic construct
AINGSGSPHSKAQDQE

SEQ ID NO: 2288 - protein, 16 aa, synthetic construct
TCNKSGSPHSKAQNQQ

SEQ ID NO: 2289 - protein, 16 aa, synthetic construct
TINGGGSPHSKAQNQL

SEQ ID NO: 2290 - protein, 16 aa, synthetic construct
NINGGGSPHSKAQNQQ

SEQ ID NO: 2291 - protein, 16 aa, synthetic construct
TEHLSGSPHSKAQNQQ

SEQ ID NO: 2292 - protein, 16 aa, synthetic construct
AEMGSGSPHSKAQNQQ

SEQ ID NO: 2293 - protein, 16 aa, synthetic construct
ATNGSGSPHSKAQNHQ

SEQ ID NO: 2294 - protein, 16 aa, synthetic construct
AIKGSGSPHSKAQDQQ

SEQ ID NO: 2295 - protein, 16 aa, synthetic construct
TINGGGSPHSKSQNQL

SEQ ID NO: 2296 - protein, 16 aa, synthetic construct
TVNGNGSPHSKAQNKQ

SEQ ID NO: 2297 - protein, 16 aa, synthetic construct
TINGSGSPHSKGHWQQ

SEQ ID NO: 2298 - protein, 16 aa, synthetic construct
TDKTSGSPHSKAQNQQ

SEQ ID NO: 2299 - protein, 16 aa, synthetic construct
TFKGSGSPHSKAPNQQ

SEQ ID NO: 2300 - protein, 16 aa, synthetic construct
TVNGSGSPHSKAQNQL

SEQ ID NO: 2301 - protein, 16 aa, synthetic construct
TINGSGSPHSKRPEQQ

SEQ ID NO: 2302 - protein, 16 aa, synthetic construct
TINGSGSPHSKAQRTM

SEQ ID NO: 2303 - protein, 16 aa, synthetic construct
TEKASGSPHSKAQNQQ

SEQ ID NO: 2304 - protein, 16 aa, synthetic construct
SDQGSGSPHSKAQNQQ

SEQ ID NO: 2305 - protein, 16 aa, synthetic construct
TEITSGSPHSKAQNQQ

SEQ ID NO: 2306 - protein, 16 aa, synthetic construct
TDKSSGSPHSKAQNQQ

SEQ ID NO: 2307 - protein, 16 aa, synthetic construct
TIDGSGSPHSKAQNQQ

SEQ ID NO: 2308 - protein, 16 aa, synthetic construct
TVNGNGSPHSKAQNQH

SEQ ID NO: 2309 - protein, 16 aa, synthetic construct
NTNGSGSPHSKAQNQQ

SEQ ID NO: 2310 - protein, 16 aa, synthetic construct
TETHSGSPHSKAQNQQ

SEQ ID NO: 2311 - protein, 16 aa, synthetic construct
TINGGGSPHSKALNQQ

SEQ ID NO: 2312 - protein, 16 aa, synthetic construct
TINGSGSPHSKALHQH

SEQ ID NO: 2313 - protein, 16 aa, synthetic construct
TINGTGSPHSKAQNHQ

SEQ ID NO: 2314 - protein, 16 aa, synthetic construct
TINGSGSPHSKAQHRI

SEQ ID NO: 2315 - protein, 16 aa, synthetic construct
TINGSGSPHSKAQYIH

SEQ ID NO: 2316 - protein, 16 aa, synthetic construct
TENISGSPHSKAQNQQ

SEQ ID NO: 2317 - protein, 16 aa, synthetic construct
TIIGGGSPHSKAHNQQ

SEQ ID NO: 2318 - protein, 16 aa, synthetic construct
TINGSGSPHSKAQKFE

SEQ ID NO: 2319 - protein, 16 aa, synthetic construct
TSNESGSPHSKAQNHQ

SEQ ID NO: 2320 - protein, 16 aa, synthetic construct
TINGSGSPHSKAQFPS

SEQ ID NO: 2321 - protein, 16 aa, synthetic construct
TERPSGSPHSKAQNQQ

SEQ ID NO: 2322 - protein, 16 aa, synthetic construct
TINGNGSPHSKAQNPL

SEQ ID NO: 2323 - protein, 16 aa, synthetic construct
SIKGNGSPHSKAQNQQ

SEQ ID NO: 2324 - protein, 16 aa, synthetic construct
TERMSGSPHSKAQNQQ

SEQ ID NO: 2325 - protein, 16 aa, synthetic construct
TERSSGSPHSKAQNQQ

SEQ ID NO: 2326 - protein, 16 aa, synthetic construct
TELHSGSPHSKAQNQQ

SEQ ID NO: 2327 - protein, 16 aa, synthetic construct
TELTSGSPHSKAQNQQ

SEQ ID NO: 2328 - protein, 16 aa, synthetic construct
TINGSGSPHSKAHNQQ

SEQ ID NO: 2329 - protein, 16 aa, synthetic construct
TINGGGSPHSKAQSQQ

SEQ ID NO: 2330 - protein, 16 aa, synthetic construct
TINGSGSPHSKAQAIK

SEQ ID NO: 2331 - protein, 16 aa, synthetic construct
TENTSGSPHSKAQNQQ

SEQ ID NO: 2332 - protein, 16 aa, synthetic construct
TIDGSGSPHSKGQNRQ

SEQ ID NO: 2333 - protein, 16 aa, synthetic construct
NINGSGSPHSKAQSQQ

SEQ ID NO: 2334 - protein, 16 aa, synthetic construct
TINGSVSPHGKAQNQL

SEQ ID NO: 2335 - protein, 16 aa, synthetic construct
TSNASGSPHSKAQNQL

SEQ ID NO: 2336 - protein, 16 aa, synthetic construct
TEARSGSPHSKAQNQQ

SEQ ID NO: 2337 - protein, 16 aa, synthetic construct
TEKNSGSPHSKAQNQQ

SEQ ID NO: 2338 - protein, 16 aa, synthetic construct
TANGSGSPHSKAQYQQ

SEQ ID NO: 2339 - protein, 16 aa, synthetic construct
TVNGSGSPHSKAQYQH

SEQ ID NO: 2340 - protein, 16 aa, synthetic construct
TINGSGSPHTKAQNPQ

SEQ ID NO: 2341 - protein, 16 aa, synthetic construct
TINGSGSPHSKGQNPP

SEQ ID NO: 2342 - protein, 16 aa, synthetic construct
TIIGSGSPHSKAQHQL

SEQ ID NO: 2343 - protein, 16 aa, synthetic construct
TINGSGSPHSKAQSPP

SEQ ID NO: 2344 - protein, 16 aa, synthetic construct
TIYGSGSPHSKAQNQQ

SEQ ID NO: 2345 - protein, 16 aa, synthetic construct
TINGSGSPHSKAQAKL

SEQ ID NO: 2346 - protein, 16 aa, synthetic construct
TDKNSGSPHSKAQNQQ

SEQ ID NO: 2347 - protein, 16 aa, synthetic construct
TINGSGSPHSKTKSQQ

SEQ ID NO: 2348 - protein, 16 aa, synthetic construct
TINGSGSPHSKAQDRP

SEQ ID NO: 2349 - protein, 16 aa, synthetic construct
TINGIGSPHSKAQNLG

SEQ ID NO: 2350 - protein, 16 aa, synthetic construct
TINGSGSPHSKAQSQQ

SEQ ID NO: 2351 - protein, 16 aa, synthetic construct
TENLSGSPHSKAQNQQ

SEQ ID NO: 2352 - protein, 16 aa, synthetic construct
TINGSGSPHSKAQAFH

SEQ ID NO: 2353 - protein, 16 aa, synthetic construct
TINGSGSPHSKAQKQQ

SEQ ID NO: 2354 - protein, 16 aa, synthetic construct
TFSGSGSPHSKAQNLQ

SEQ ID NO: 2355 - protein, 16 aa, synthetic construct
AINGSGSPHSKAQNAQ

SEQ ID NO: 2356 - protein, 16 aa, synthetic construct
TESWSGSPHSKAQNQQ

SEQ ID NO: 2357 - protein, 16 aa, synthetic construct
TTNGSGSPHSKAHNQL

SEQ ID NO: 2358 - protein, 16 aa, synthetic construct
TVNGNGSPHSKAQNHQ

SEQ ID NO: 2359 - protein, 16 aa, synthetic construct
TEDKSGSPHSKAQNQQ

SEQ ID NO: 2360 - protein, 16 aa, synthetic construct
TESASGSPHSKAQNQQ

SEQ ID NO: 2361 - protein, 16 aa, synthetic construct
TNNGSGSPHSKAQNQQ

SEQ ID NO: 2362 - protein, 16 aa, synthetic construct
TSNGGGSPHSKAQNLQ

SEQ ID NO: 2363 - protein, 16 aa, synthetic construct
TDKMSGSPHSKAQNQQ

SEQ ID NO: 2364 - protein, 16 aa, synthetic construct
EVHGSGSPHSKAQNQQ

SEQ ID NO: 2365 - protein, 16 aa, synthetic construct
TINGSGSPHSKAQKLN

SEQ ID NO: 2366 - protein, 16 aa, synthetic construct
TINGGGSPHSKSQNQH

SEQ ID NO: 2367 - protein, 16 aa, synthetic construct
TVNGGGSPHSKAQSQQ

SEQ ID NO: 2368 - protein, 16 aa, synthetic construct
TTNGSGSPHSKAQYQH

SEQ ID NO: 2369 - protein, 16 aa, synthetic construct
TISGSGSPHSKAQYQH

SEQ ID NO: 2370 - protein, 16 aa, synthetic construct
TESTSGSPHSKAQNQQ

SEQ ID NO: 2371 - protein, 16 aa, synthetic construct
TINGSGSPHSKSQNVQ

SEQ ID NO: 2372 - protein, 16 aa, synthetic construct
SINGSGSPHSKAQAQQ

SEQ ID NO: 2373 - protein, 16 aa, synthetic construct
TVNGSGSPHSKAQNLQ

SEQ ID NO: 2374 - protein, 16 aa, synthetic construct
TVRDSGSPHSKAQNQQ

SEQ ID NO: 2375 - protein, 16 aa, synthetic construct
TFNASGSPHSKAPNQQ

SEQ ID NO: 2376 - protein, 16 aa, synthetic construct
TDRMSGSPHSKAQNQQ

SEQ ID NO: 2377 - protein, 16 aa, synthetic construct
TINGSGSPHSKAQTPP

SEQ ID NO: 2378 - protein, 16 aa, synthetic construct
TIKGSGSPHSKAQNQQ

SEQ ID NO: 2379 - protein, 16 aa, synthetic construct
NHIGSGSPHSKAQNQQ

SEQ ID NO: 2380 - protein, 16 aa, synthetic construct
TINGSGSPHSKAQYQH

SEQ ID NO: 2381 - protein, 16 aa, synthetic construct
TIPIDGSPHSKAQNQQ

SEQ ID NO: 2382 - protein, 16 aa, synthetic construct
TINGSGSPHSKAQGQQ

SEQ ID NO: 2383 - protein, 16 aa, synthetic construct
TFNGSGSPHNKAQNHQ

SEQ ID NO: 2384 - protein, 16 aa, synthetic construct
ESDGSGSPHSKAQNQQ

SEQ ID NO: 2385 - protein, 16 aa, synthetic construct
TINGSGSPHSKAQPPA

SEQ ID NO: 2386 - protein, 16 aa, synthetic construct
TINGSGSPHSKAQERP

SEQ ID NO: 2387 - protein, 16 aa, synthetic construct
TIKGSGSPHSKAQDLQ

SEQ ID NO: 2388 - protein, 16 aa, synthetic construct
TDLKSGSPHSKAQNQQ

SEQ ID NO: 2389 - protein, 16 aa, synthetic construct
TINGGGSPHSKAQNPP

SEQ ID NO: 2390 - protein, 16 aa, synthetic construct
TINGSGSPHSKAQAMH

SEQ ID NO: 2391 - protein, 16 aa, synthetic construct
TVPNSGSPHSKAQNQQ

SEQ ID NO: 2392 - protein, 16 aa, synthetic construct
TVIGSGSPHSKALNQQ

SEQ ID NO: 2393 - protein, 16 aa, synthetic construct
TINGSGSPHSKAQHPS

SEQ ID NO: 2394 - protein, 16 aa, synthetic construct
TINGLGSPHSKSQNQQ

SEQ ID NO: 2395 - protein, 16 aa, synthetic construct
TINGTGSPHSKAQNQQ

SEQ ID NO: 2396 - protein, 16 aa, synthetic construct
TINGSGSPHSKAPGLQ

SEQ ID NO: 2397 - protein, 16 aa, synthetic construct
TINGSGSPHSKAQGIR

SEQ ID NO: 2398 - protein, 16 aa, synthetic construct
TESHSGSPHSKAQNQQ

SEQ ID NO: 2399 - protein, 16 aa, synthetic construct
TINGSGSPHSKAQAPA

SEQ ID NO: 2400 - protein, 16 aa, synthetic construct
TINGSGSPHSKSQSQQ

SEQ ID NO: 2401 - protein, 16 aa, synthetic construct
AEHGSGSPHSKAQNQQ

SEQ ID NO: 2402 - protein, 16 aa, synthetic construct
TEDRSGSPHSKAQNQQ

SEQ ID NO: 2403 - protein, 16 aa, synthetic construct
NCLGSGSPHSKAQNQQ

SEQ ID NO: 2404 - protein, 16 aa, synthetic construct
TDRGSGSPHSKAQNQQ

SEQ ID NO: 2405 - protein, 16 aa, synthetic construct
TINGSGSPHSKAQIPP

SEQ ID NO: 2406 - protein, 16 aa, synthetic construct
TVKGSGSPHSKAQDQQ

SEQ ID NO: 2407 - protein, 16 aa, synthetic construct
NADGSGSPHSKAQNQQ

SEQ ID NO: 2408 - protein, 16 aa, synthetic construct
TDKVSGSPHSKAQNQQ

SEQ ID NO: 2409 - protein, 16 aa, synthetic construct
TITGSGSPHSKAQTQL

SEQ ID NO: 2410 - protein, 16 aa, synthetic construct
TINGSGSPHSKAQAPS

SEQ ID NO: 2411 - protein, 16 aa, synthetic construct
NCVGSGSPHSKAQNQQ

SEQ ID NO: 2412 - protein, 16 aa, synthetic construct
TIRDAGSPHSKAQNQQ

SEQ ID NO: 2413 - protein, 16 aa, synthetic construct
TVKDSGSPHSKAQNQQ

SEQ ID NO: 2414 - protein, 16 aa, synthetic construct
NALGSGSPHSKAQNQQ

SEQ ID NO: 2415 - protein, 16 aa, synthetic construct
VINGSGSPHSKGQNQQ

SEQ ID NO: 2416 - protein, 16 aa, synthetic construct
TVNGGGSPHSKAQNQQ

SEQ ID NO: 2417 - protein, 16 aa, synthetic construct
TIQDGGSPHSKAQNQQ

SEQ ID NO: 2418 - protein, 16 aa, synthetic construct
TISGGGSPHSKAQNQQ

SEQ ID NO: 2419 - protein, 16 aa, synthetic construct
TSNASGSPHSKAHNQQ

SEQ ID NO: 2420 - protein, 16 aa, synthetic construct
TINGSGSPHSKAQNTY

SEQ ID NO: 2421 - protein, 16 aa, synthetic construct
TINGSGSPHSKSQNQH

SEQ ID NO: 2422 - protein, 16 aa, synthetic construct
TINGGGSPHSKAQDKQ

SEQ ID NO: 2423 - protein, 16 aa, synthetic construct
TEFVSGSPHSKAQNQQ

SEQ ID NO: 2424 - protein, 16 aa, synthetic construct
TVNGSGSPHSKAQNHL

SEQ ID NO: 2425 - protein, 16 aa, synthetic construct
TREISGSPHSKAQNQQ

SEQ ID NO: 2426 - protein, 16 aa, synthetic construct
TINGSGSPHSKAQIGM

SEQ ID NO: 2427 - protein, 16 aa, synthetic construct
TIDGSGSPHSKALNKQ

SEQ ID NO: 2428 - protein, 16 aa, synthetic construct
TIIGGGSPHSKAQNPQ

SEQ ID NO: 2429 - protein, 16 aa, synthetic construct
QGEGSGSPHSKAQNQQ

SEQ ID NO: 2430 - protein, 16 aa, synthetic construct
TINGTGSPHSKAPNQL

SEQ ID NO: 2431 - protein, 16 aa, synthetic construct
TVNGSGSPHSKAQLQQ

SEQ ID NO: 2432 - protein, 16 aa, synthetic construct
TFNGGGSPHSKAQYQQ

SEQ ID NO: 2433 - protein, 16 aa, synthetic construct
SINGSGSPHSKTQSQQ

SEQ ID NO: 2434 - protein, 16 aa, synthetic construct
TVNGGGSPHSKAQHQQ

SEQ ID NO: 2435 - protein, 16 aa, synthetic construct
SEKGSGSPHSKAQNQQ

SEQ ID NO: 2436 - protein, 16 aa, synthetic construct
NVNGSGSPHSKAQNQQ

SEQ ID NO: 2437 - protein, 16 aa, synthetic construct
GGEGSGSPHSKAQNQQ

SEQ ID NO: 2438 - protein, 16 aa, synthetic construct
TINGSGSPHSKAQRMS

SEQ ID NO: 2439 - protein, 16 aa, synthetic construct
TINGSGSPHSKAQGIL

SEQ ID NO: 2440 - protein, 16 aa, synthetic construct
EFVGSGSPHSKAQNQQ

SEQ ID NO: 2441 - protein, 16 aa, synthetic construct
TIIGSGSPHSKAQDRQ

SEQ ID NO: 2442 - protein, 16 aa, synthetic construct
SDKGSGSPHSKAQNQQ

SEQ ID NO: 2443 - protein, 16 aa, synthetic construct
TEQVSGSPHSKAQNQQ

SEQ ID NO: 2444 - protein, 16 aa, synthetic construct
TEHVSGSPHSKAQNQQ

SEQ ID NO: 2445 - protein, 16 aa, synthetic construct
TINGSGSPHSKARDWQ

SEQ ID NO: 2446 - protein, 16 aa, synthetic construct
TENASGSPHSKAQNQQ

SEQ ID NO: 2447 - protein, 16 aa, synthetic construct
EVQGSGSPHSKAQNQQ

SEQ ID NO: 2448 - protein, 16 aa, synthetic construct
TINGSGSPHSKAQNTH

SEQ ID NO: 2449 - protein, 16 aa, synthetic construct
TINGSGSPHSKAPNLQ

SEQ ID NO: 2450 - protein, 16 aa, synthetic construct
TINGSGSPHSKAQERS

SEQ ID NO: 2451 - protein, 16 aa, synthetic construct
TSNGSGSPHSKAQNYQ

SEQ ID NO: 2452 - protein, 16 aa, synthetic construct
TEYISGSPHSKAQNQQ

SEQ ID NO: 2453 - protein, 16 aa, synthetic construct
TINGSGSPHSKAQRTC

SEQ ID NO: 2454 - protein, 16 aa, synthetic construct
TINGSGSPHSKAQIGH

SEQ ID NO: 2455 - protein, 16 aa, synthetic construct
NCWGSGSPHSKAQNQQ

SEQ ID NO: 2456 - protein, 16 aa, synthetic construct
TINGSGSPHSKAQGAI

SEQ ID NO: 2457 - protein, 16 aa, synthetic construct
TDVNSGSPHSKAQNQQ

SEQ ID NO: 2458 - protein, 16 aa, synthetic construct
SDIGSGSPHSKAQNQQ

SEQ ID NO: 2459 - protein, 16 aa, synthetic construct
TINGSGSPHSKAQVPP

SEQ ID NO: 2460 - protein, 16 aa, synthetic construct
TINGSGSPHSKAQVQQ

SEQ ID NO: 2461 - protein, 16 aa, synthetic construct
TINGSGSPHSKALMRQ

SEQ ID NO: 2462 - protein, 16 aa, synthetic construct
TINGSGSPHSKAQYSV

SEQ ID NO: 2463 - protein, 16 aa, synthetic construct
NSIGSGSPHSKAQNQQ

SEQ ID NO: 2464 - protein, 16 aa, synthetic construct
TINGSGSPHSKVPNLQ

SEQ ID NO: 2465 - protein, 16 aa, synthetic construct
AINGSGSPHSKAQSQQ

SEQ ID NO: 2466 - protein, 16 aa, synthetic construct
TINGSGSPHSKAQAIT

SEQ ID NO: 2467 - protein, 16 aa, synthetic construct
TINGSGSPHSKAQKTL

SEQ ID NO: 2468 - protein, 16 aa, synthetic construct
TVNGSGSPHSKAQNQW

SEQ ID NO: 2469 - protein, 16 aa, synthetic construct
TINGSGSPHSKAQLHH

SEQ ID NO: 2470 - protein, 16 aa, synthetic construct
TEQTSGSPHSKAQNQQ

SEQ ID NO: 2471 - protein, 16 aa, synthetic construct
TINGSGSPHSKAQNII

SEQ ID NO: 2472 - protein, 16 aa, synthetic construct
NSLGSGSPHSKAQNQQ

SEQ ID NO: 2473 - protein, 16 aa, synthetic construct
TIPMEGSPHSKAQNQQ

SEQ ID NO: 2474 - protein, 16 aa, synthetic construct
TINGSGSPHSKAQGHH

SEQ ID NO: 2475 - protein, 16 aa, synthetic construct
TDRTSGSPHSKAQNQQ

SEQ ID NO: 2476 - protein, 16 aa, synthetic construct
TINGSGSPHSKAQSKV

SEQ ID NO: 2477 - protein, 16 aa, synthetic construct
EVVGSGSPHSKAQNQQ

SEQ ID NO: 2478 - protein, 16 aa, synthetic construct
TINGSGSPHSKAQLPS

SEQ ID NO: 2479 - protein, 16 aa, synthetic construct
TINGSGSPHSKAIGKQ

SEQ ID NO: 2480 - protein, 16 aa, synthetic construct
TEPTSGSPHSKAQNQQ

SEQ ID NO: 2481 - protein, 16 aa, synthetic construct
TVNGGGSPHSKSQNQQ

SEQ ID NO: 2482 - protein, 16 aa, synthetic construct
TINGSGSPHSKAQAIH

SEQ ID NO: 2483 - protein, 16 aa, synthetic construct
TINGSGSPHSKAQHGL

SEQ ID NO: 2484 - protein, 16 aa, synthetic construct
SELGSGSPHSKAQNQQ

SEQ ID NO: 2485 - protein, 16 aa, synthetic construct
TINGSGSPHSKAQFMC

SEQ ID NO: 2486 - protein, 16 aa, synthetic construct
TINVSGSPHSKAQGQQ

SEQ ID NO: 2487 - protein, 16 aa, synthetic construct
TINGGGSPHSKAQNQM

SEQ ID NO: 2488 - protein, 16 aa, synthetic construct
TVNGSGSPHSKAQHLQ

SEQ ID NO: 2489 - protein, 16 aa, synthetic construct
TIRENGSPHSKAQNQQ

SEQ ID NO: 2490 - protein, 16 aa, synthetic construct
TINGSGSPHSKTQNHQ

SEQ ID NO: 2491 - protein, 16 aa, synthetic construct
TINGSGSPHSKAQPAR

SEQ ID NO: 2492 - protein, 16 aa, synthetic construct
TVNGSGSPHSKAQSLQ

SEQ ID NO: 2493 - protein, 16 aa, synthetic construct
TINGSGSPHSKSQSQL

SEQ ID NO: 2494 - protein, 16 aa, synthetic construct
TINGSASPHSKAHSQQ

SEQ ID NO: 2495 - protein, 16 aa, synthetic construct
TWQNSGSPHSKAQNQQ

SEQ ID NO: 2496 - protein, 16 aa, synthetic construct
TINGSGSPHSKAQDRQ

SEQ ID NO: 2497 - protein, 16 aa, synthetic construct
TINGSGSPHSKAQMPS

SEQ ID NO: 2498 - protein, 16 aa, synthetic construct
TNNGGGSPHSKAQNLQ

SEQ ID NO: 2499 - protein, 16 aa, synthetic construct
TINGSGSPHSKAQGSL

SEQ ID NO: 2500 - protein, 16 aa, synthetic construct
TEVTSGSPHSKAQNQQ

SEQ ID NO: 2501 - protein, 16 aa, synthetic construct
SINGGGSPHSKAQYQQ

SEQ ID NO: 2502 - protein, 16 aa, synthetic construct
TVIGSGSPHSKSQNQQ

SEQ ID NO: 2503 - protein, 16 aa, synthetic construct
AVNVSGSPHSKAQNQQ

SEQ ID NO: 2504 - protein, 16 aa, synthetic construct
TVNGNGSPHSKSQNQQ

SEQ ID NO: 2505 - protein, 16 aa, synthetic construct
TDRNSGSPHSKAQNQQ

SEQ ID NO: 2506 - protein, 16 aa, synthetic construct
TINGSGSPHSKAQVPA

SEQ ID NO: 2507 - protein, 16 aa, synthetic construct
GVLGSGSPHSKAQNQQ

SEQ ID NO: 2508 - protein, 16 aa, synthetic construct
TLNGNGSPHSKAQNLQ

SEQ ID NO: 2509 - protein, 16 aa, synthetic construct
AINGSGSPHSKAQDKQ

SEQ ID NO: 2510 - protein, 16 aa, synthetic construct
TSNGSGSPHSKAHYQQ

SEQ ID NO: 2511 - protein, 16 aa, synthetic construct
TINGSGSPHSKAQVPS

SEQ ID NO: 2512 - protein, 16 aa, synthetic construct
TELRSGSPHSKAQNQQ

SEQ ID NO: 2513 - protein, 16 aa, synthetic construct
NINGSGSPHSKAQNHQ

SEQ ID NO: 2514 - protein, 16 aa, synthetic construct
TVNGGGSPHSKAQNHQ

SEQ ID NO: 2515 - protein, 16 aa, synthetic construct
TINGSGSPHSKARGEQ

SEQ ID NO: 2516 - protein, 16 aa, synthetic construct
TINGGGSPHSKAQYQH

SEQ ID NO: 2517 - protein, 16 aa, synthetic construct
TEDLSGSPHSKAQNQQ

SEQ ID NO: 2518 - protein, 16 aa, synthetic construct
TINGSGSPHSKAPGQQ

SEQ ID NO: 2519 - protein, 16 aa, synthetic construct
TIPKNGSPHSKAQNQQ

SEQ ID NO: 2520 - protein, 16 aa, synthetic construct
TINGSGSPHSKAQSLQ

SEQ ID NO: 2521 - protein, 16 aa, synthetic construct
TINGSGSPHSKRLEQQ

SEQ ID NO: 2522 - protein, 16 aa, synthetic construct
TERGSGSPHSKAQNQQ

SEQ ID NO: 2523 - protein, 16 aa, synthetic construct
TVNGSGSPHSKAPNQQ

SEQ ID NO: 2524 - protein, 16 aa, synthetic construct
TSNGSGSPHSKAQNQS

SEQ ID NO: 2525 - protein, 16 aa, synthetic construct
TINGSGSPHSKAQKVI

SEQ ID NO: 2526 - protein, 16 aa, synthetic construct
TEGISGSPHSKAQNQQ

SEQ ID NO: 2527 - protein, 16 aa, synthetic construct
TINGSGSPHSKAQNND

SEQ ID NO: 2528 - protein, 16 aa, synthetic construct
TINGSGSPHSKAQSVH

SEQ ID NO: 2529 - protein, 16 aa, synthetic construct
TINGSGSPHSKAQPLG

SEQ ID NO: 2530 - protein, 16 aa, synthetic construct
TINKEGSPHSKAQNQQ

SEQ ID NO: 2531 - protein, 16 aa, synthetic construct
TCNASGSPHSKAQNQQ

SEQ ID NO: 2532 - protein, 16 aa, synthetic construct
AINGSGSPHSKAHNQE

SEQ ID NO: 2533 - protein, 16 aa, synthetic construct
TEGLSGSPHSKAQNQQ

SEQ ID NO: 2534 - protein, 16 aa, synthetic construct
TRDASGSPHSKAQNQQ

SEQ ID NO: 2535 - protein, 16 aa, synthetic construct
TSNGSGSPHSKAQNLQ

SEQ ID NO: 2536 - protein, 16 aa, synthetic construct
TGNGSGSPHSKAQIQQ

SEQ ID NO: 2537 - protein, 16 aa, synthetic construct
TVNGGGSPHSKAQNLQ

SEQ ID NO: 2538 - protein, 16 aa, synthetic construct
TDRSSGSPHSKAQNQQ

SEQ ID NO: 2539 - protein, 16 aa, synthetic construct
TINGSGSPHSKAQVRN

SEQ ID NO: 2540 - protein, 16 aa, synthetic construct
TINGSGSPHSKAPSNQ

SEQ ID NO: 2541 - protein, 16 aa, synthetic construct
TINGSGSPHSKAQVGH

SEQ ID NO: 2542 - protein, 16 aa, synthetic construct
NAIGSGSPHSKAQNQQ

SEQ ID NO: 2543 - protein, 16 aa, synthetic construct
AENGSGSPHSKAQNQQ

SEQ ID NO: 2544 - protein, 16 aa, synthetic construct
TINGSGSPHSKAQRDI

SEQ ID NO: 2545 - protein, 16 aa, synthetic construct
TINGSGSPHSKAQMPN

SEQ ID NO: 2546 - protein, 16 aa, synthetic construct
TVNGSGSPHSKSQNQQ

SEQ ID NO: 2547 - protein, 16 aa, synthetic construct
TIPAIGSPHSKAQNQQ

SEQ ID NO: 2548 - protein, 16 aa, synthetic construct
TINGSGSPHSKARGLQ

SEQ ID NO: 2549 - protein, 16 aa, synthetic construct
TELGSGSPHSKAQNQQ

SEQ ID NO: 2550 - protein, 16 aa, synthetic construct
AETGSGSPHSKAQNQQ

SEQ ID NO: 2551 - protein, 16 aa, synthetic construct
TINGSGSPHSKLQKQQ

SEQ ID NO: 2552 - protein, 16 aa, synthetic construct
TINGSGSPHSKAPSLQ

SEQ ID NO: 2553 - protein, 16 aa, synthetic construct
TINGSGSPHSKAQRDQ

SEQ ID NO: 2554 - protein, 16 aa, synthetic construct
TDVGSGSPHSKAQNQQ

SEQ ID NO: 2555 - protein, 16 aa, synthetic construct
TINGSGSPHSKNRDQQ

SEQ ID NO: 2556 - protein, 16 aa, synthetic construct
SINGSGSPHSKAPNLQ

SEQ ID NO: 2557 - protein, 16 aa, synthetic construct
TINGSGSPHSKAQAKG

SEQ ID NO: 2558 - protein, 16 aa, synthetic construct
TVNGSGSPHSKAQDKQ

SEQ ID NO: 2559 - protein, 16 aa, synthetic construct
TINGGGSPHSKAQNPQ

SEQ ID NO: 2560 - protein, 16 aa, synthetic construct
TINGSGSPHSKAQSAH

SEQ ID NO: 2561 - protein, 16 aa, synthetic construct
TINGNGSPHSKSQNQH

SEQ ID NO: 2562 - protein, 16 aa, synthetic construct
TVPTSGSPHSKAQNQQ

SEQ ID NO: 2563 - protein, 16 aa, synthetic construct
TIDGSGSPHSKSQNHQ

SEQ ID NO: 2564 - protein, 16 aa, synthetic construct
TDVKSGSPHSKAQNQQ

SEQ ID NO: 2565 - protein, 16 aa, synthetic construct
AINRSGSPHSKAQDQQ

SEQ ID NO: 2566 - protein, 16 aa, synthetic construct
TINGSGSPHSKAQSTM

SEQ ID NO: 2567 - protein, 16 aa, synthetic construct
TVNASGSPHSKAQNQL

SEQ ID NO: 2568 - protein, 16 aa, synthetic construct
TINGSGSPHSKAQREM

SEQ ID NO: 2569 - protein, 16 aa, synthetic construct
TVHGSGSPHSKAQSQQ

SEQ ID NO: 2570 - protein, 16 aa, synthetic construct
TINGGGSPHSKSQNRQ

SEQ ID NO: 2571 - protein, 16 aa, synthetic construct
TINGSGSPHSKAQYRA

SEQ ID NO: 2572 - protein, 16 aa, synthetic construct
TINGGGSPHSKAQRQQ

SEQ ID NO: 2573 - protein, 16 aa, synthetic construct
TEPMSGSPHSKAQNQQ

SEQ ID NO: 2574 - protein, 16 aa, synthetic construct
TINGSGSPHSKNQWQQ

SEQ ID NO: 2575 - protein, 16 aa, synthetic construct
ETAGSGSPHSKAQNQQ

SEQ ID NO: 2576 - protein, 16 aa, synthetic construct
TINGSGSPHSKAQRMN

SEQ ID NO: 2577 - protein, 16 aa, synthetic construct
NNLGSGSPHSKAQNQQ

SEQ ID NO: 2578 - protein, 16 aa, synthetic construct
TINGSGSPHAKAQNHQ

SEQ ID NO: 2579 - protein, 16 aa, synthetic construct
TIIKNGSPHSKAQNQQ

SEQ ID NO: 2580 - protein, 16 aa, synthetic construct
TINGSGSPHSKAGDSQ

SEQ ID NO: 2581 - protein, 16 aa, synthetic construct
TINGSGSPHSKLKSQQ

SEQ ID NO: 2582 - protein, 16 aa, synthetic construct
TINGSGSPHSKAQKIS

SEQ ID NO: 2583 - protein, 16 aa, synthetic construct
TEYNSGSPHSKAQNQQ

SEQ ID NO: 2584 - protein, 16 aa, synthetic construct
TINGSGSPHSKAPSMQ

SEQ ID NO: 2585 - protein, 16 aa, synthetic construct
AINGSGSPHSKAQNQQ

SEQ ID NO: 2586 - protein, 16 aa, synthetic construct
TINGSGSPHSKASPRQ

SEQ ID NO: 2587 - protein, 16 aa, synthetic construct
TINGSGSPHSKRMEQQ

SEQ ID NO: 2588 - protein, 16 aa, synthetic construct
TINGSGSPHSKAQYQN

SEQ ID NO: 2589 - protein, 16 aa, synthetic construct
TINGSGSPHSKAQYYV

SEQ ID NO: 2590 - protein, 16 aa, synthetic construct
TINGSGSPHSKLRRQQ

SEQ ID NO: 2591 - protein, 16 aa, synthetic construct
TINGSGSPHSKAGCGQ

SEQ ID NO: 2592 - protein, 16 aa, synthetic construct
SMNGSGSPHSRAQNQQ

SEQ ID NO: 2593 - protein, 16 aa, synthetic construct
TINGSGSPHSKRLRQQ

SEQ ID NO: 2594 - protein, 16 aa, synthetic construct
TINGSGSPHSLRRNQQ

SEQ ID NO: 2595 - protein, 16 aa, synthetic construct
TINGSGSPHSRGRNQQ

SEQ ID NO: 2596 - protein, 16 aa, synthetic construct
TINGSGSPHSSRRNQQ

SEQ ID NO: 2597 - protein, 16 aa, synthetic construct
TINGSGSPHSKAFRLQ

SEQ ID NO: 2598 - protein, 16 aa, synthetic construct
TINGSCSPHRKAQNQQ

SEQ ID NO: 2599 - protein, 16 aa, synthetic construct
TINGSGSPHFLRQNQQ

SEQ ID NO: 2600 - protein, 16 aa, synthetic construct
TINGSGSPHSLRFNQQ

SEQ ID NO: 2601 - protein, 16 aa, synthetic construct
TINGSGSPHSKWLLQQ

SEQ ID NO: 2602 - protein, 16 aa, synthetic construct
TINGSGSPHSKRRLQQ

SEQ ID NO: 2603 - protein, 16 aa, synthetic construct
TINGSGSPHSKAQRKL

SEQ ID NO: 2604 - protein, 16 aa, synthetic construct
TINGSGSPHSKALRRQ

SEQ ID NO: 2605 - protein, 16 aa, synthetic construct
TINGSGSPHSKAQRLR

SEQ ID NO: 2606 - protein, 16 aa, synthetic construct
YLSGSGSPHSKAQNQQ

SEQ ID NO: 2607 - protein, 16 aa, synthetic construct
TINGSGSPHSKAQRRL

SEQ ID NO: 2608 - protein, 16 aa, synthetic construct
TINGSGSPHSKARRQQ

SEQ ID NO: 2609 - protein, 16 aa, synthetic construct
TINGSGSPHSKARRLQ

SEQ ID NO: 2610 - protein, 16 aa, synthetic construct
TINGSGSPHSKSRRQQ

SEQ ID NO: 2611 - protein, 16 aa, synthetic construct
TINGLLSPHWKAQNQQ

SEQ ID NO: 2612 - protein, 16 aa, synthetic construct
TINGSGSPHSKARLRQ

SEQ ID NO: 2613 - protein, 16 aa, synthetic construct
TINGSGSPHSKASKRQ

SEQ ID NO: 2614 - protein, 16 aa, synthetic construct
TINGSGSPHVRRQNQQ

SEQ ID NO: 2615 - protein, 16 aa, synthetic construct
TINGSGSPHSKAQLYR

SEQ ID NO: 2616 - protein, 16 aa, synthetic construct
GLSGSGSPHSKAQNQQ

SEQ ID NO: 2617 - protein, 16 aa, synthetic construct
TINGSGSPHSKAQLTV

SEQ ID NO: 2618 - protein, 16 aa, synthetic construct
TINGHDSPHKRGQHRQ

SEQ ID NO: 2619 - protein, 16 aa, synthetic construct
MPEGHDSPHKSGQNQQ

SEQ ID NO: 2620 - protein, 16 aa, synthetic construct
MEGGHDSPHKSGQNQQ

SEQ ID NO: 2621 - protein, 16 aa, synthetic construct
MEYGHDSPHKSGQNQQ

SEQ ID NO: 2622 - protein, 16 aa, synthetic construct
AEWGHDSPHKSGQNQQ

SEQ ID NO: 2623 - protein, 16 aa, synthetic construct
CEWGHDSPHKSGQNQQ

SEQ ID NO: 2624 - protein, 16 aa, synthetic construct
ANNGQDSPHKSGQNQQ

SEQ ID NO: 2625 - protein, 16 aa, synthetic construct
IPEGHDSPHKSGQNQQ

SEQ ID NO: 2626 - protein, 16 aa, synthetic construct
ADMGHDSPHKSGQNQQ

SEQ ID NO: 2627 - protein, 16 aa, synthetic construct
IEYGHDSPHKSGQNQQ

SEQ ID NO: 2628 - protein, 16 aa, synthetic construct
ADYGHDSPHKSGQNQQ

SEQ ID NO: 2629 - protein, 16 aa, synthetic construct
IETGHDSPHKSGQNQQ

SEQ ID NO: 2630 - protein, 16 aa, synthetic construct
MEWGHDSPHKSGQNQQ

SEQ ID NO: 2631 - protein, 16 aa, synthetic construct
CEYGHDSPHKSGQNQQ

SEQ ID NO: 2632 - protein, 16 aa, synthetic construct
RINGHDSPHKSGQKQQ

SEQ ID NO: 2633 - protein, 16 aa, synthetic construct
MEIGHDSPHKSGQNQQ

SEQ ID NO: 2634 - protein, 16 aa, synthetic construct
LEYGHDSPHKSGQNQQ

SEQ ID NO: 2635 - protein, 16 aa, synthetic construct
ADWGHDSPHKSGQNQQ

SEQ ID NO: 2636 - protein, 16 aa, synthetic construct
IEIGHDSPHKSGQNQQ

SEQ ID NO: 2637 - protein, 16 aa, synthetic construct
DIMGHDSPHKSGQNQQ

SEQ ID NO: 2638 - protein, 16 aa, synthetic construct
FEQGHDSPHKSGQNQQ

SEQ ID NO: 2639 - protein, 16 aa, synthetic construct
MEFGHDSPHKSGQNQQ

SEQ ID NO: 2640 - protein, 16 aa, synthetic construct
CDQGHDSPHKSGQNQQ

SEQ ID NO: 2641 - protein, 16 aa, synthetic construct
LPEGHDSPHKSGQNQQ

SEQ ID NO: 2642 - protein, 16 aa, synthetic construct
IENGHDSPHKSGQNQQ

SEQ ID NO: 2643 - protein, 16 aa, synthetic construct
MESGHDSPHKSGQNQQ

SEQ ID NO: 2644 - protein, 16 aa, synthetic construct
AEIGHDSPHKSGQNQQ

SEQ ID NO: 2645 - protein, 16 aa, synthetic construct
VEYGHDSPHKSGQNQQ

SEQ ID NO: 2646 - protein, 16 aa, synthetic construct
IINGHDSPHKSGLTQQ

SEQ ID NO: 2647 - protein, 16 aa, synthetic construct
TSNGDDSPHKSGRNQQ

SEQ ID NO: 2648 - protein, 16 aa, synthetic construct
IEVGHDSPHKSGQNQQ

SEQ ID NO: 2649 - protein, 16 aa, synthetic construct
MEMGHDSPHKSGQNQQ

SEQ ID NO: 2650 - protein, 16 aa, synthetic construct
AEVGHDSPHKSGQNQQ

SEQ ID NO: 2651 - protein, 16 aa, synthetic construct
MDAGHDSPHKSGQNQQ

SEQ ID NO: 2652 - protein, 16 aa, synthetic construct
VEWGHDSPHKSGQNQQ

SEQ ID NO: 2653 - protein, 16 aa, synthetic construct
AEQGHDSPHKSGQNQQ

SEQ ID NO: 2654 - protein, 16 aa, synthetic construct
LEWGHDSPHKSGQNQQ

SEQ ID NO: 2655 - protein, 16 aa, synthetic construct
MELGHDSPHKSGQNQQ

SEQ ID NO: 2656 - protein, 16 aa, synthetic construct
METGHDSPHKSGQNQQ

SEQ ID NO: 2657 - protein, 16 aa, synthetic construct
MEAGHDSPHKSGQNQQ

SEQ ID NO: 2658 - protein, 16 aa, synthetic construct
IESGHDSPHKSGQNQQ

SEQ ID NO: 2659 - protein, 16 aa, synthetic construct
MEVGHDSPHKSGQNQQ

SEQ ID NO: 2660 - protein, 16 aa, synthetic construct
CEIGHDSPHKSGQNQQ

SEQ ID NO: 2661 - protein, 16 aa, synthetic construct
ATNGHDSPHKSGLNQQ

SEQ ID NO: 2662 - protein, 16 aa, synthetic construct
MDGGHDSPHKSGQNQQ

SEQ ID NO: 2663 - protein, 16 aa, synthetic construct
QEVGHDSPHKSGQNQQ

SEQ ID NO: 2664 - protein, 16 aa, synthetic construct
ADQGHDSPHKSGQNQQ

SEQ ID NO: 2665 - protein, 16 aa, synthetic construct
TINGHESPHKSAQNHQ

SEQ ID NO: 2666 - protein, 16 aa, synthetic construct
TINGHDSPHKSAQNQW

SEQ ID NO: 2667 - protein, 16 aa, synthetic construct
NMNGHDSPHKSGQNTH

SEQ ID NO: 2668 - protein, 16 aa, synthetic construct
IEMGHDSPHKSGQNQQ

SEQ ID NO: 2669 - protein, 16 aa, synthetic construct
TINGHDSPHKSGRRRQ

SEQ ID NO: 2670 - protein, 16 aa, synthetic construct
ISNGHDSPHKSAQNQQ

SEQ ID NO: 2671 - protein, 16 aa, synthetic construct
TGNGHDSPHKSGQYQQ

SEQ ID NO: 2672 - protein, 16 aa, synthetic construct
TINGNYSPHKIGQNQQ

SEQ ID NO: 2673 - protein, 16 aa, synthetic construct
TINGHDSPHKSRQNDQ

SEQ ID NO: 2674 - protein, 16 aa, synthetic construct
QQQGHDSPHKSGQNQQ

SEQ ID NO: 2675 - protein, 16 aa, synthetic construct
HDWGHDSPHKSGQNQQ

SEQ ID NO: 2676 - protein, 16 aa, synthetic construct
IEGGHDSPHKSGQNQQ

SEQ ID NO: 2677 - protein, 16 aa, synthetic construct
TFNRSGSPHSKAQNQQ

SEQ ID NO: 2678 - protein, 16 aa, synthetic construct
AINGHDSPHKSGQIRQ

SEQ ID NO: 2679 - protein, 16 aa, synthetic construct
TINGHDSPHKIGQNQH

SEQ ID NO: 2680 - protein, 16 aa, synthetic construct
AINGYDSPHKSGQKQQ

SEQ ID NO: 2681 - protein, 16 aa, synthetic construct
TESGHDSPHKSGQNQQ

SEQ ID NO: 2682 - protein, 16 aa, synthetic construct
TINGHDSPHKSGQSVQ

SEQ ID NO: 2683 - protein, 16 aa, synthetic construct
TINGHESPHKSGRSQQ

SEQ ID NO: 2684 - protein, 16 aa, synthetic construct
TINGHDSPHKSGQNKL

SEQ ID NO: 2685 - protein, 16 aa, synthetic construct
TINGHDSPHKTGQNQQ

SEQ ID NO: 2686 - protein, 16 aa, synthetic construct
TINGRGSPHKRGQNQQ

SEQ ID NO: 2687 - protein, 16 aa, synthetic construct
TINGSGSPHTKAQNPP

SEQ ID NO: 2688 - protein, 16 aa, synthetic construct
TINGQDSPHKSGQHQQ

SEQ ID NO: 2689 - protein, 16 aa, synthetic construct
SINGHDSPHKSGQIQH

SEQ ID NO: 2690 - protein, 16 aa, synthetic construct
AINGHDSPHKSGPRQQ

SEQ ID NO: 2691 - protein, 16 aa, synthetic construct
TVNGHDSPHKSGHTQQ

SEQ ID NO: 2692 - protein, 16 aa, synthetic construct
SINGHDSPHKSGQRQH

SEQ ID NO: 2693 - protein, 16 aa, synthetic construct
SLNGSGSPHTKAQNQQ

SEQ ID NO: 2694 - protein, 16 aa, synthetic construct
AINGHDSPHKSAQSQQ

SEQ ID NO: 2695 - protein, 16 aa, synthetic construct
SIYGHESPHKSGQNQQ

SEQ ID NO: 2696 - protein, 16 aa, synthetic construct
TVNGHDSPHKSLQNQQ

SEQ ID NO: 2697 - protein, 16 aa, synthetic construct
TINGHGSPHSKAQNPQ

SEQ ID NO: 2698 - protein, 16 aa, synthetic construct
TSNGYDSPHKSGQKQQ

SEQ ID NO: 2699 - protein, 16 aa, synthetic construct
TVNGHDSPHKSGRNQE

SEQ ID NO: 2700 - protein, 16 aa, synthetic construct
TTNGHDSPHKSGQTQL

SEQ ID NO: 2701 - protein, 16 aa, synthetic construct
AINGHDSPHKSEKNQQ

SEQ ID NO: 2702 - protein, 16 aa, synthetic construct
IINGRDSPHKSGQDQQ

SEQ ID NO: 2703 - protein, 16 aa, synthetic construct
TISGHDSPHKTGHNQQ

SEQ ID NO: 2704 - protein, 16 aa, synthetic construct
SINGYDSPHKSGQTQQ

SEQ ID NO: 2705 - protein, 16 aa, synthetic construct
TINGHESPHKSGQTQQ

SEQ ID NO: 2706 - protein, 16 aa, synthetic construct
TINGHDSPHKSGQSKQ

SEQ ID NO: 2707 - protein, 16 aa, synthetic construct
AIIGHESPHKSGQNQQ

SEQ ID NO: 2708 - protein, 16 aa, synthetic construct
TINGHDSPHKTGQNQP

SEQ ID NO: 2709 - protein, 16 aa, synthetic construct
AINGHDSPHKSGQSPQ

SEQ ID NO: 2710 - protein, 16 aa, synthetic construct
TIKGNDSPHKSVQNQQ

SEQ ID NO: 2711 - protein, 16 aa, synthetic construct
TEFGHDSPHKSGQNQQ

SEQ ID NO: 2712 - protein, 16 aa, synthetic construct
TINGHDSPHKSAQNYQ

SEQ ID NO: 2713 - protein, 16 aa, synthetic construct
TFNGSASPHSKALNQQ

SEQ ID NO: 2714 - protein, 16 aa, synthetic construct
TINGHESPHKSAQNRQ

SEQ ID NO: 2715 - protein, 16 aa, synthetic construct
TTNGHDSPHKSGQNQQ

SEQ ID NO: 2716 - protein, 16 aa, synthetic construct
TIKGQDSPHKIGQNQQ

SEQ ID NO: 2717 - protein, 16 aa, synthetic construct
TVNGHDSPHKSGQNHL

SEQ ID NO: 2718 - protein, 16 aa, synthetic construct
SINGHDSPHKSGQYQH

SEQ ID NO: 2719 - protein, 16 aa, synthetic construct
TINGNDSPHKSVQNHQ

SEQ ID NO: 2720 - protein, 16 aa, synthetic construct
TITGHDSPHKSGQNQW

SEQ ID NO: 2721 - protein, 16 aa, synthetic construct
TNNGHDSPHKSVQNQH

SEQ ID NO: 2722 - protein, 16 aa, synthetic construct
TIDGHDSPHKSGQNQH

SEQ ID NO: 2723 - protein, 16 aa, synthetic construct
TVNGHDSPHKSGQTRQ

SEQ ID NO: 2724 - protein, 16 aa, synthetic construct
TVNGHDSPHKSGQNLH

SEQ ID NO: 2725 - protein, 16 aa, synthetic construct
AISGHDSPHKSGLNQQ

SEQ ID NO: 2726 - protein, 16 aa, synthetic construct
AINGHDSPHKSAQNQE

SEQ ID NO: 2727 - protein, 16 aa, synthetic construct
TITGHDSPHKSGQHLQ

SEQ ID NO: 2728 - protein, 16 aa, synthetic construct
TINGHDSPHKSRLNQP

SEQ ID NO: 2729 - protein, 16 aa, synthetic construct
TVDGHDSPHKSGQKQQ

SEQ ID NO: 2730 - protein, 16 aa, synthetic construct
TINGQDSPHKSGQNQD

SEQ ID NO: 2731 - protein, 16 aa, synthetic construct
TIEGHDSPHKSGRNQQ

SEQ ID NO: 2732 - protein, 16 aa, synthetic construct
TTNGHDSPHKSGQNLL

SEQ ID NO: 2733 - protein, 16 aa, synthetic construct
TINGHDSPHKSGQLVI

SEQ ID NO: 2734 - protein, 16 aa, synthetic construct
TVNGHDSPHKSRQSQQ

SEQ ID NO: 2735 - protein, 16 aa, synthetic construct
TINGHDSPHKSGRTQE

SEQ ID NO: 2736 - protein, 16 aa, synthetic construct
TINGHDSPHKSVQTHQ

SEQ ID NO: 2737 - protein, 16 aa, synthetic construct
TSNGHDSPHKSGQNQP

SEQ ID NO: 2738 - protein, 16 aa, synthetic construct
VINGHDSPHKSGQTQQ

SEQ ID NO: 2739 - protein, 16 aa, synthetic construct
TINGPDSPHKIGQNQQ

SEQ ID NO: 2740 - protein, 16 aa, synthetic construct
AVNGHDSPHKSVQNQQ

SEQ ID NO: 2741 - protein, 16 aa, synthetic construct
TINGHDSPHKSRQDQH

SEQ ID NO: 2742 - protein, 16 aa, synthetic construct
AINGPDSPHKSGQKQQ

SEQ ID NO: 2743 - protein, 16 aa, synthetic construct
TINGHDSPHKSRQSQH

SEQ ID NO: 2744 - protein, 16 aa, synthetic construct
TIYGHDSPHKSVQNQL

SEQ ID NO: 2745 - protein, 16 aa, synthetic construct
TVNGHDSPHKSGQNLL

SEQ ID NO: 2746 - protein, 16 aa, synthetic construct
TENKSGSPHSKAQNQQ

SEQ ID NO: 2747 - protein, 16 aa, synthetic construct
TTNGQDSPHKSGQNQQ

SEQ ID NO: 2748 - protein, 16 aa, synthetic construct
TDKGSGSPHSKAQNQQ

SEQ ID NO: 2749 - protein, 16 aa, synthetic construct
TIDGHDSPHKSGRNQQ

SEQ ID NO: 2750 - protein, 16 aa, synthetic construct
TINGYDSPHKSGQYQH

SEQ ID NO: 2751 - protein, 16 aa, synthetic construct
TDNGHDSPHKSRQNQQ

SEQ ID NO: 2752 - protein, 16 aa, synthetic construct
TINGHDSPHKSWVRQQ

SEQ ID NO: 2753 - protein, 16 aa, synthetic construct
TINGHESPHKSGQNQH

SEQ ID NO: 2754 - protein, 16 aa, synthetic construct
TVNGHDSPHKIGHNQQ

SEQ ID NO: 2755 - protein, 16 aa, synthetic construct
TCNGHDSPHKSGRNQQ

SEQ ID NO: 2756 - protein, 16 aa, synthetic construct
TINGNGSPHSKAQNHQ

SEQ ID NO: 2757 - protein, 16 aa, synthetic construct
NVVGHDSPHKSGQNQQ

SEQ ID NO: 2758 - protein, 16 aa, synthetic construct
TINGHDSPHKSNAWQQ

SEQ ID NO: 2759 - protein, 16 aa, synthetic construct
TDAGHDSPHKSGQNQQ

SEQ ID NO: 2760 - protein, 16 aa, synthetic construct
TEVGHDSPHKSGQNQQ

SEQ ID NO: 2761 - protein, 16 aa, synthetic construct
SELGHDSPHKSGQNQQ

SEQ ID NO: 2762 - protein, 16 aa, synthetic construct
TINGHDSPHKSGQSVP

SEQ ID NO: 2763 - protein, 16 aa, synthetic construct
TINGHESPHKSGQNIQ

SEQ ID NO: 2764 - protein, 16 aa, synthetic construct
TINGHDSPHKSVQNHL

SEQ ID NO: 2765 - protein, 16 aa, synthetic construct
TINGHDSPHKIGLDQQ

SEQ ID NO: 2766 - protein, 16 aa, synthetic construct
TSNASGSPHSKAQHQQ

SEQ ID NO: 2767 - protein, 16 aa, synthetic construct
TINGHDSPHKRGPDQQ

SEQ ID NO: 2768 - protein, 16 aa, synthetic construct
TINGMGSPHSKTQNQQ

SEQ ID NO: 2769 - protein, 16 aa, synthetic construct
TIKGHDSPHKSGESQQ

SEQ ID NO: 2770 - protein, 16 aa, synthetic construct
TINGHDSPHKHGQNHQ

SEQ ID NO: 2771 - protein, 16 aa, synthetic construct
TVNGTGSPHSKAQNQL

SEQ ID NO: 2772 - protein, 16 aa, synthetic construct
TIIGHDSPHKSGQYQH

SEQ ID NO: 2773 - protein, 16 aa, synthetic construct
TSNGHDSPHKSVQNKQ

SEQ ID NO: 2774 - protein, 16 aa, synthetic construct
IVNGQVSPHKSGQNQQ

SEQ ID NO: 2775 - protein, 16 aa, synthetic construct
TVNGHDSPHKSGQRQL

SEQ ID NO: 2776 - protein, 16 aa, synthetic construct
TVNGHDSPHKIGQNQL

SEQ ID NO: 2777 - protein, 16 aa, synthetic construct
TINGHDSPHKSGQIIV

SEQ ID NO: 2778 - protein, 16 aa, synthetic construct
IGNGHESPHKSGQNQQ

SEQ ID NO: 2779 - protein, 16 aa, synthetic construct
EVMGHDSPHKSGQNQQ

SEQ ID NO: 2780 - protein, 16 aa, synthetic construct
TINGYDSPHKSGQKQS

SEQ ID NO: 2781 - protein, 16 aa, synthetic construct
TIHGNGSPHSKAQNQE

SEQ ID NO: 2782 - protein, 16 aa, synthetic construct
YQVGHDSPHKSGQNQQ

SEQ ID NO: 2783 - protein, 16 aa, synthetic construct
TIKGDDSPHKSVQNQQ

SEQ ID NO: 2784 - protein, 16 aa, synthetic construct
TINGHDSPHKSVQSHQ

SEQ ID NO: 2785 - protein, 16 aa, synthetic construct
TINGHDSPHKSGQFVV

SEQ ID NO: 2786 - protein, 16 aa, synthetic construct
TVNGHDSPHKSRQNLQ

SEQ ID NO: 2787 - protein, 16 aa, synthetic construct
ATNGHNSPHKSGQNQE

SEQ ID NO: 2788 - protein, 16 aa, synthetic construct
AINGHDSPHKSAQNQQ

SEQ ID NO: 2789 - protein, 16 aa, synthetic construct
TEHGHDSPHKSGQNQQ

SEQ ID NO: 2790 - protein, 16 aa, synthetic construct
TIYGHDSPHKSGQSQP

SEQ ID NO: 2791 - protein, 16 aa, synthetic construct
TISGHESPHKSGQNEQ

SEQ ID NO: 2792 - protein, 16 aa, synthetic construct
AIIGHDSPHKSAQNQQ

SEQ ID NO: 2793 - protein, 16 aa, synthetic construct
AIDGHDSPHKSGQNQL

SEQ ID NO: 2794 - protein, 16 aa, synthetic construct
TIMGHDSPHKSVQNQQ

SEQ ID NO: 2795 - protein, 16 aa, synthetic construct
EVGGHDSPHKSGQNQQ

SEQ ID NO: 2796 - protein, 16 aa, synthetic construct
TINGHDSPHKSAQNLL

SEQ ID NO: 2797 - protein, 16 aa, synthetic construct
TINASGSPHSKAINQQ

SEQ ID NO: 2798 - protein, 16 aa, synthetic construct
AINGNGSPHKRGQNQQ

SEQ ID NO: 2799 - protein, 16 aa, synthetic construct
SEMGHDSPHKSGQNQQ

SEQ ID NO: 2800 - protein, 16 aa, synthetic construct
AQQGHDSPHKSGQNQQ

SEQ ID NO: 2801 - protein, 16 aa, synthetic construct
AINGHDSPHKSGQSLQ

SEQ ID NO: 2802 - protein, 16 aa, synthetic construct
TINGSGSPHSKAPNQQ

SEQ ID NO: 2803 - protein, 16 aa, synthetic construct
CGEGHDSPHKSGQNQQ

SEQ ID NO: 2804 - protein, 16 aa, synthetic construct
TVNGHDSPHKSAQNHQ

SEQ ID NO: 2805 - protein, 16 aa, synthetic construct
TVNGHDSPHKSGQTQL

SEQ ID NO: 2806 - protein, 16 aa, synthetic construct
TNNGHDSPHKSGRNRQ

SEQ ID NO: 2807 - protein, 16 aa, synthetic construct
TINGHDSPHKYGQNEQ

SEQ ID NO: 2808 - protein, 16 aa, synthetic construct
TINGNGSPHSKAPNLQ

SEQ ID NO: 2809 - protein, 16 aa, synthetic construct
SINGHDSPHKSQQNQQ

SEQ ID NO: 2810 - protein, 16 aa, synthetic construct
TIGGHDSPHKSGQNQQ

SEQ ID NO: 2811 - protein, 16 aa, synthetic construct
TINGHDSPHKSVQSKQ

SEQ ID NO: 2812 - protein, 16 aa, synthetic construct
ELVGHDSPHKSGQNQQ

SEQ ID NO: 2813 - protein, 16 aa, synthetic construct
ELMGHDSPHKSGQNQQ

SEQ ID NO: 2814 - protein, 16 aa, synthetic construct
TINGNDSPHKIGHNQQ

SEQ ID NO: 2815 - protein, 16 aa, synthetic construct
TIKGGGSPHSKAQDQQ

SEQ ID NO: 2816 - protein, 16 aa, synthetic construct
TVNGHDSPHKSGQTQQ

SEQ ID NO: 2817 - protein, 16 aa, synthetic construct
TINGQDSPHKSGQNPL

SEQ ID NO: 2818 - protein, 16 aa, synthetic construct
TVNASGSPHSKAQNHQ

SEQ ID NO: 2819 - protein, 16 aa, synthetic construct
TINGHDSPHKSGRDQK

SEQ ID NO: 2820 - protein, 16 aa, synthetic construct
TINGHDSPHKSVHNQQ

SEQ ID NO: 2821 - protein, 16 aa, synthetic construct
TINGHDSPHKSGQWKR

SEQ ID NO: 2822 - protein, 16 aa, synthetic construct
TIDGSGSPHSKAENRQ

SEQ ID NO: 2823 - protein, 16 aa, synthetic construct
NEIGHDSPHKSGQNQQ

SEQ ID NO: 2824 - protein, 16 aa, synthetic construct
AINGHDSPHKSGQSQQ

SEQ ID NO: 2825 - protein, 16 aa, synthetic construct
IINGHDSPHKSRQAQQ

SEQ ID NO: 2826 - protein, 16 aa, synthetic construct
TPNGHDSPHKSGQNQQ

SEQ ID NO: 2827 - protein, 16 aa, synthetic construct
ITNGHDSPHKSGQTQQ

SEQ ID NO: 2828 - protein, 16 aa, synthetic construct
TINGHDSPHKSVQNHQ

SEQ ID NO: 2829 - protein, 16 aa, synthetic construct
TINGHDSPHKSKQNQQ

SEQ ID NO: 2830 - protein, 16 aa, synthetic construct
TINGHDSPHKSAQNQL

SEQ ID NO: 2831 - protein, 16 aa, synthetic construct
TVNGHDSPHKSGQTQP

SEQ ID NO: 2832 - protein, 16 aa, synthetic construct
TDQGHDSPHKSGQNQQ

SEQ ID NO: 2833 - protein, 16 aa, synthetic construct
TINGHDSPHKLWINQQ

SEQ ID NO: 2834 - protein, 16 aa, synthetic construct
GINGPDSPHKSGQNQQ

SEQ ID NO: 2835 - protein, 16 aa, synthetic construct
SEIGHDSPHKSGQNQQ

SEQ ID NO: 2836 - protein, 16 aa, synthetic construct
TINGHDSPHKSVQKQL

SEQ ID NO: 2837 - protein, 16 aa, synthetic construct
TINGHPSPHWKGQNQQ

SEQ ID NO: 2838 - protein, 16 aa, synthetic construct
TVNGHDSPHKSGRNQL

SEQ ID NO: 2839 - protein, 16 aa, synthetic construct
TIKGSGSPHSKVQDQQ

SEQ ID NO: 2840 - protein, 16 aa, synthetic construct
SEKGHDSPHKSGQNQQ

SEQ ID NO: 2841 - protein, 16 aa, synthetic construct
WSAGHDSPHKSGQNQQ

SEQ ID NO: 2842 - protein, 16 aa, synthetic construct
ELAGHDSPHKSGQNQQ

SEQ ID NO: 2843 - protein, 16 aa, synthetic construct
TINGHDSPHKMGRNQQ

SEQ ID NO: 2844 - protein, 16 aa, synthetic construct
TINGHDSPHKSGISIQ

SEQ ID NO: 2845 - protein, 16 aa, synthetic construct
TSNGHDSPHKSVQNLQ

SEQ ID NO: 2846 - protein, 16 aa, synthetic construct
QTQGHDSPHKSGQNQQ

SEQ ID NO: 2847 - protein, 16 aa, synthetic construct
TINGHDSPHKMAHNQQ

SEQ ID NO: 2848 - protein, 16 aa, synthetic construct
AINGSGSPHSKAQTQQ

SEQ ID NO: 2849 - protein, 16 aa, synthetic construct
TINGHDSPHKHGQNQQ

SEQ ID NO: 2850 - protein, 16 aa, synthetic construct
GADGHDSPHKSGQNQQ

SEQ ID NO: 2851 - protein, 16 aa, synthetic construct
VGEGHDSPHKSGQNQQ

SEQ ID NO: 2852 - protein, 16 aa, synthetic construct
ANEGHDSPHKSGQNQQ

SEQ ID NO: 2853 - protein, 16 aa, synthetic construct
TEAKSGSPHSKAQNQQ

SEQ ID NO: 2854 - protein, 16 aa, synthetic construct
TINGHDSPHKSVQSQQ

SEQ ID NO: 2855 - protein, 16 aa, synthetic construct
TIPGSGSPHSKAQNLQ

SEQ ID NO: 2856 - protein, 16 aa, synthetic construct
TINGHDSPHKSGQTVC

SEQ ID NO: 2857 - protein, 16 aa, synthetic construct
ELRGHDSPHKSGQNQQ

SEQ ID NO: 2858 - protein, 16 aa, synthetic construct
CQIGHDSPHKSGQNQQ

SEQ ID NO: 2859 - protein, 16 aa, synthetic construct
GVMGHDSPHKSGQNQQ

SEQ ID NO: 2860 - protein, 16 aa, synthetic construct
ACDGHDSPHKSGQNQQ

SEQ ID NO: 2861 - protein, 16 aa, synthetic construct
TINGQDSPHKSGQYQQ

SEQ ID NO: 2862 - protein, 16 aa, synthetic construct
TINGHDSPHKSGQQIM

SEQ ID NO: 2863 - protein, 16 aa, synthetic construct
TINGHDSPHKSRQNEQ

SEQ ID NO: 2864 - protein, 16 aa, synthetic construct
ASNGHDSPHKSGLNHQ

SEQ ID NO: 2865 - protein, 16 aa, synthetic construct
TVNGHDSPHKSGQSQP

SEQ ID NO: 2866 - protein, 16 aa, synthetic construct
NELGHDSPHKSGQNQQ

SEQ ID NO: 2867 - protein, 16 aa, synthetic construct
AAEGHDSPHKSGQNQQ

SEQ ID NO: 2868 - protein, 16 aa, synthetic construct
GQNGHDSPHKSGQNQQ

SEQ ID NO: 2869 - protein, 16 aa, synthetic construct
NEFGHDSPHKSGQNQQ

SEQ ID NO: 2870 - protein, 16 aa, synthetic construct
TSIGYDSPHKSGQNQQ

SEQ ID NO: 2871 - protein, 16 aa, synthetic construct
TDNGHDSPHKSGQNLQ

SEQ ID NO: 2872 - protein, 16 aa, synthetic construct
TITGHDSPHKSRQDQQ

SEQ ID NO: 2873 - protein, 16 aa, synthetic construct
AEHGHDSPHKSGQNQQ

SEQ ID NO: 2874 - protein, 16 aa, synthetic construct
TINGDDSPHKSGQKQL

SEQ ID NO: 2875 - protein, 16 aa, synthetic construct
EILGHDSPHKSGQNQQ

SEQ ID NO: 2876 - protein, 16 aa, synthetic construct
TIHGSGSPHSKAQNQA

SEQ ID NO: 2877 - protein, 16 aa, synthetic construct
AINGDDSPHKSGHNQQ

SEQ ID NO: 2878 - protein, 16 aa, synthetic construct
TSNGHNSPHKSGQNQE

SEQ ID NO: 2879 - protein, 16 aa, synthetic construct
TINGHDSPHKSGQMIH

SEQ ID NO: 2880 - protein, 16 aa, synthetic construct
NAIGHDSPHKSGQNQQ

SEQ ID NO: 2881 - protein, 16 aa, synthetic construct
VINGHDSPHKSGRNHQ

SEQ ID NO: 2882 - protein, 16 aa, synthetic construct
TITGHDSPHKSVQNRQ

SEQ ID NO: 2883 - protein, 16 aa, synthetic construct
TINGHDSPHKSGQKMN

SEQ ID NO: 2884 - protein, 16 aa, synthetic construct
TIHGHDSPHKSGQSQQ

SEQ ID NO: 2885 - protein, 16 aa, synthetic construct
TEIGHDSPHKSGQNQQ

SEQ ID NO: 2886 - protein, 16 aa, synthetic construct
TINGHDSPHKSGQYQH

SEQ ID NO: 2887 - protein, 14 aa, synthetic construct
GSGSPHSKAQNRHT

SEQ ID NO: 2888 - protein, 14 aa, synthetic construct
GSGSPHSKVQNQQT

SEQ ID NO: 2889 - protein, 14 aa, synthetic construct
MSGSPHSKAQNQQT

SEQ ID NO: 2890 - protein, 14 aa, synthetic construct
GSGSPHSKARDQQT

SEQ ID NO: 2891 - protein, 14 aa, synthetic construct
GSGSPHSKAPNLQT

SEQ ID NO: 2892 - protein, 14 aa, synthetic construct
TSGSPHSKAQNQQT

SEQ ID NO: 2893 - protein, 14 aa, synthetic construct
GSGSPHSKAHVRQT

SEQ ID NO: 2894 - protein, 14 aa, synthetic construct
GSGSPHSKAPNQHT

SEQ ID NO: 2895 - protein, 14 aa, synthetic construct
ISGSPHSKAQNQQT

SEQ ID NO: 2896 - protein, 14 aa, synthetic construct
GSGSPHSKTQSQQT

SEQ ID NO: 2897 - skipped

SEQ ID NO: 2898 - protein, 14 aa, synthetic construct
ESGSPHSKAQNQQI

SEQ ID NO: 2899 - protein, 14 aa, synthetic construct
GSGSPHSKAQPAKT

SEQ ID NO: 2900 - protein, 14 aa, synthetic construct
SSGSPHSKAQNQQT

SEQ ID NO: 2901 - protein, 14 aa, synthetic construct
GSGSPHSKSQTQQN

SEQ ID NO: 2902 - protein, 14 aa, synthetic construct
ASGSPHSKAQNQQT

SEQ ID NO: 2903 - protein, 14 aa, synthetic construct
GSGSPHSKAQNLAT

SEQ ID NO: 2904 - protein, 14 aa, synthetic construct
GSGSPHSKSQNQLT

SEQ ID NO: 2905 - protein, 14 aa, synthetic construct
NSGSPHSKAQNQQT

SEQ ID NO: 2906 - protein, 14 aa, synthetic construct
GSGSPHSKAQGQQT

SEQ ID NO: 2907 - protein, 14 aa, synthetic construct
VSGSPHSKAQNQQT

SEQ ID NO: 2908 - protein, 14 aa, synthetic construct
GSGSPHSKALNRQS

SEQ ID NO: 2909 - protein, 14 aa, synthetic construct
LSGSPHSKAQNQQT

SEQ ID NO: 2910 - protein, 14 aa, synthetic construct
GSGSPHSKAHNQQT

SEQ ID NO: 2911 - protein, 14 aa, synthetic construct
GSGSPHSKTQNQQT

SEQ ID NO: 2912 - protein, 14 aa, synthetic construct
GSGSPHSKAQNPPT

SEQ ID NO: 2913 - protein, 14 aa, synthetic construct
GSGSPHSKAQNLQT

SEQ ID NO: 2914 - protein, 14 aa, synthetic construct
GSGSPHSKAQYQQT

SEQ ID NO: 2915 - protein, 14 aa, synthetic construct
GSGSPHSKAQDQET

SEQ ID NO: 2916 - protein, 14 aa, synthetic construct
KSGSPHSKAQNQQT

SEQ ID NO: 2917 - protein, 14 aa, synthetic construct
GSGSPHSKAQNHQT

SEQ ID NO: 2918 - protein, 14 aa, synthetic construct
GSGSPHSKAQDQQT

SEQ ID NO: 2919 - protein, 14 aa, synthetic construct
GSGSPHSKGHWQQT

SEQ ID NO: 2920 - protein, 14 aa, synthetic construct
GSGSPHSKAPNQQT

SEQ ID NO: 2921 - protein, 14 aa, synthetic construct
GSGSPHSKAQNQLI

SEQ ID NO: 2922 - protein, 14 aa, synthetic construct
GSGSPHSKRPEQQT

SEQ ID NO: 2923 - protein, 14 aa, synthetic construct
GSGSPHSKAQRTMT

SEQ ID NO: 2924 - protein, 14 aa, synthetic construct
GSGSPHSKAQNQQH

SEQ ID NO: 2925 - protein, 14 aa, synthetic construct
HSGSPHSKAQNQQT

SEQ ID NO: 2926 - protein, 14 aa, synthetic construct
GSGSPHSKALHQHT

SEQ ID NO: 2927 - protein, 14 aa, synthetic construct
GSGSPHSKAQHRIT

SEQ ID NO: 2928 - protein, 14 aa, synthetic construct
GSGSPHSKAQYIHT

SEQ ID NO: 2929 - protein, 14 aa, synthetic construct
GSGSPHSKAQKFET

SEQ ID NO: 2930 - protein, 14 aa, synthetic construct
ESGSPHSKAQNHQT

SEQ ID NO: 2931 - protein, 14 aa, synthetic construct
GSGSPHSKAQFPST

SEQ ID NO: 2932 - protein, 14 aa, synthetic construct
PSGSPHSKAQNQQT

SEQ ID NO: 2933 - protein, 14 aa, synthetic construct
GSGSPHSKAHNQQR

SEQ ID NO: 2934 - protein, 14 aa, synthetic construct
GSGSPHSKAQAIKT

SEQ ID NO: 2935 - protein, 14 aa, synthetic construct
GSGSPHSKGQNRQT

SEQ ID NO: 2936 - protein, 14 aa, synthetic construct
GSGSPHSKAQSQQT

SEQ ID NO: 2937 - protein, 14 aa, synthetic construct
ASGSPHSKAQNQLT

SEQ ID NO: 2938 - protein, 14 aa, synthetic construct
RSGSPHSKAQNQQT

SEQ ID NO: 2939 - protein, 14 aa, synthetic construct
GSGSPHSKAQYQHT

SEQ ID NO: 2940 - protein, 14 aa, synthetic construct
GSGSPHTKAQNPQS

SEQ ID NO: 2941 - protein, 14 aa, synthetic construct
GSGSPHSKGQNPPT

SEQ ID NO: 2942 - protein, 14 aa, synthetic construct
GSGSPHSKAQHQLT

SEQ ID NO: 2943 - protein, 14 aa, synthetic construct
GSGSPHSKAQSPPT

SEQ ID NO: 2944 - protein, 14 aa, synthetic construct
GSGSPHSKAQAKLT

SEQ ID NO: 2945 - protein, 14 aa, synthetic construct
GSGSPHSKTKSQQT

SEQ ID NO: 2946 - protein, 14 aa, synthetic construct
GSGSPHSKAQDRPT

SEQ ID NO: 2947 - protein, 14 aa, synthetic construct
GSGSPHSKAQSQQL

SEQ ID NO: 2948 - protein, 14 aa, synthetic construct
GSGSPHSKAQAFHT

SEQ ID NO: 2949 - protein, 14 aa, synthetic construct
GSGSPHSKAQKQQD

SEQ ID NO: 2950 - protein, 14 aa, synthetic construct
GSGSPHSKAQNAQT

SEQ ID NO: 2951 - protein, 14 aa, synthetic construct
WSGSPHSKAQNQQT

SEQ ID NO: 2952 - protein, 14 aa, synthetic construct
GSGSPHSKAHNQLT

SEQ ID NO: 2953 - protein, 14 aa, synthetic construct
GSGSPHSKAQNQQY

SEQ ID NO: 2954 - protein, 14 aa, synthetic construct
GSGSPHSKAQKLNT

SEQ ID NO: 2955 - protein, 14 aa, synthetic construct
GSGSPHSKSQNVQT

SEQ ID NO: 2956 - protein, 14 aa, synthetic construct
GSGSPHSKAQAQQT

SEQ ID NO: 2957 - protein, 14 aa, synthetic construct
GSGSPHSKAQNLQA

SEQ ID NO: 2958 - protein, 14 aa, synthetic construct
DSGSPHSKAQNQQT

SEQ ID NO: 2959 - protein, 14 aa, synthetic construct
ASGSPHSKAPNQQT

SEQ ID NO: 2960 - protein, 14 aa, synthetic construct
GSGSPHSKAQTPPT

SEQ ID NO: 2961 - protein, 14 aa, synthetic construct
GSGSPHSKAQYQHA

SEQ ID NO: 2962 - protein, 14 aa, synthetic construct
GSGSPHSKAQGQQA

SEQ ID NO: 2963 - protein, 14 aa, synthetic construct
GSGSPHNKAQNHQT

SEQ ID NO: 2964 - protein, 14 aa, synthetic construct
GSGSPHSKAQPPAT

SEQ ID NO: 2965 - protein, 14 aa, synthetic construct
GSGSPHSKAQERPT

SEQ ID NO: 2966 - protein, 14 aa, synthetic construct
GSGSPHSKAQDLQT

SEQ ID NO: 2967 - protein, 14 aa, synthetic construct
GSGSPHSKAQAMHT

SEQ ID NO: 2968 - protein, 14 aa, synthetic construct
GSGSPHSKALNQQT

SEQ ID NO: 2969 - protein, 14 aa, synthetic construct
GSGSPHSKAQHPST

SEQ ID NO: 2970 - protein, 14 aa, synthetic construct
GSGSPHSKAPGLQT

SEQ ID NO: 2971 - protein, 14 aa, synthetic construct
GSGSPHSKAQGIRT

SEQ ID NO: 2972 - protein, 14 aa, synthetic construct
GSGSPHSKAQAPAT

SEQ ID NO: 2973 - protein, 14 aa, synthetic construct
GSGSPHSKSQSQQI

SEQ ID NO: 2974 - protein, 14 aa, synthetic construct
GSGSPHSKAQIPPT

SEQ ID NO: 2975 - protein, 14 aa, synthetic construct
GSGSPHSKAQTQLT

SEQ ID NO: 2976 - protein, 14 aa, synthetic construct
GSGSPHSKAQAPST

SEQ ID NO: 2977 - protein, 14 aa, synthetic construct
GSGSPHSKGQNQQT

SEQ ID NO: 2978 - protein, 14 aa, synthetic construct
ASGSPHSKAHNQQT

SEQ ID NO: 2979 - protein, 14 aa, synthetic construct
GSGSPHSKAQNTYA

SEQ ID NO: 2980 - protein, 14 aa, synthetic construct
GSGSPHSKSQNQHI

SEQ ID NO: 2981 - protein, 14 aa, synthetic construct
GSGSPHSKAQNHLT

SEQ ID NO: 2982 - protein, 14 aa, synthetic construct
GSGSPHSKAQIGMT

SEQ ID NO: 2983 - protein, 14 aa, synthetic construct
GSGSPHSKALNKQT

SEQ ID NO: 2984 - protein, 14 aa, synthetic construct
GSGSPHSKAQLQQT

SEQ ID NO: 2985 - protein, 14 aa, synthetic construct
GSGSPHSKAQRMST

SEQ ID NO: 2986 - protein, 14 aa, synthetic construct
GSGSPHSKAQGILT

SEQ ID NO: 2987 - protein, 14 aa, synthetic construct
GSGSPHSKAQDRQT

SEQ ID NO: 2988 - protein, 14 aa, synthetic construct
GSGSPHSKARDWQT

SEQ ID NO: 2989 - protein, 14 aa, synthetic construct
GSGSPHSKAQNTHD

SEQ ID NO: 2990 - protein, 14 aa, synthetic construct
GSGSPHSKAPNLQI

SEQ ID NO: 2991 - protein, 14 aa, synthetic construct
GSGSPHSKAQERST

SEQ ID NO: 2992 - protein, 14 aa, synthetic construct
GSGSPHSKAQNYQT

SEQ ID NO: 2993 - protein, 14 aa, synthetic construct
GSGSPHSKAQRTCT

SEQ ID NO: 2994 - protein, 14 aa, synthetic construct
GSGSPHSKAQIGHT

SEQ ID NO: 2995 - protein, 14 aa, synthetic construct
GSGSPHSKAQGAIT

SEQ ID NO: 2996 - protein, 14 aa, synthetic construct
GSGSPHSKAQVPPT

SEQ ID NO: 2997 - protein, 14 aa, synthetic construct
GSGSPHSKAQVQQI

SEQ ID NO: 2998 - protein, 14 aa, synthetic construct
GSGSPHSKALMRQT

SEQ ID NO: 2999 - protein, 14 aa, synthetic construct
GSGSPHSKAQYSVT

SEQ ID NO: 3000 - protein, 14 aa, synthetic construct
GSGSPHSKVPNLQT

SEQ ID NO: 3001 - protein, 14 aa, synthetic construct
GSGSPHSKAQSQQI

SEQ ID NO: 3002 - protein, 14 aa, synthetic construct
GSGSPHSKAQAITT

SEQ ID NO: 3003 - protein, 14 aa, synthetic construct
GSGSPHSKAQKTLT

SEQ ID NO: 3004 - protein, 14 aa, synthetic construct
GSGSPHSKAQNQWT

SEQ ID NO: 3005 - protein, 14 aa, synthetic construct
GSGSPHSKAQLHHT

SEQ ID NO: 3006 - protein, 14 aa, synthetic construct
GSGSPHSKAQNIII

SEQ ID NO: 3007 - protein, 14 aa, synthetic construct
GSGSPHSKAQGHHT

SEQ ID NO: 3008 - protein, 14 aa, synthetic construct
GSGSPHSKAQSKVT

SEQ ID NO: 3009 - protein, 14 aa, synthetic construct
GSGSPHSKAQLPST

SEQ ID NO: 3010 - protein, 14 aa, synthetic construct
GSGSPHSKAIGKQT

SEQ ID NO: 3011 - protein, 14 aa, synthetic construct
GSGSPHSKAQAIHT

SEQ ID NO: 3012 - protein, 14 aa, synthetic construct
GSGSPHSKAQHGLT

SEQ ID NO: 3013 - protein, 14 aa, synthetic construct
GSGSPHSKAQFMCT

SEQ ID NO: 3014 - protein, 14 aa, synthetic construct
VSGSPHSKAQGQQT

SEQ ID NO: 3015 - protein, 14 aa, synthetic construct
GSGSPHSKAQHLQT

SEQ ID NO: 3016 - protein, 14 aa, synthetic construct
GSGSPHSKTQNHQN

SEQ ID NO: 3017 - protein, 14 aa, synthetic construct
GSGSPHSKAQPART

SEQ ID NO: 3018 - protein, 14 aa, synthetic construct
GSGSPHSKAQSLQT

SEQ ID NO: 3019 - protein, 14 aa, synthetic construct
GSGSPHSKSQSQLT

SEQ ID NO: 3020 - protein, 14 aa, synthetic construct
GSGSPHSKAQDRQS

SEQ ID NO: 3021 - protein, 14 aa, synthetic construct
GSGSPHSKAQMPST

SEQ ID NO: 3022 - protein, 14 aa, synthetic construct
GSGSPHSKAQGSLT

SEQ ID NO: 3023 - protein, 14 aa, synthetic construct
GSGSPHSKSQNQQT

SEQ ID NO: 3024 - protein, 14 aa, synthetic construct
GSGSPHSKAQVPAT

SEQ ID NO: 3025 - protein, 14 aa, synthetic construct
GSGSPHSKAQDKQT

SEQ ID NO: 3026 - protein, 14 aa, synthetic construct
GSGSPHSKAHYQQT

SEQ ID NO: 3027 - protein, 14 aa, synthetic construct
GSGSPHSKAQVPST

SEQ ID NO: 3028 - protein, 14 aa, synthetic construct
GSGSPHSKARGEQT

SEQ ID NO: 3029 - protein, 14 aa, synthetic construct
GSGSPHSKAPGQQT

SEQ ID NO: 3030 - protein, 14 aa, synthetic construct
GSGSPHSKAQSLQI

SEQ ID NO: 3031 - protein, 14 aa, synthetic construct
GSGSPHSKRLEQQT

SEQ ID NO: 3032 - protein, 14 aa, synthetic construct
GSGSPHSKAQNQST

SEQ ID NO: 3033 - protein, 14 aa, synthetic construct
GSGSPHSKAQKVIT

SEQ ID NO: 3034 - protein, 14 aa, synthetic construct
GSGSPHSKAQNNDQ

SEQ ID NO: 3035 - protein, 14 aa, synthetic construct
GSGSPHSKAQSVHT

SEQ ID NO: 3036 - protein, 14 aa, synthetic construct
GSGSPHSKAQPLGT

SEQ ID NO: 3037 - protein, 14 aa, synthetic construct
GSGSPHSKAHNQET

SEQ ID NO: 3038 - protein, 14 aa, synthetic construct
GSGSPHSKAQNLQI

SEQ ID NO: 3039 - protein, 14 aa, synthetic construct
GSGSPHSKAQIQQT

SEQ ID NO: 3040 - protein, 14 aa, synthetic construct
GSGSPHSKAQVRNT

SEQ ID NO: 3041 - protein, 14 aa, synthetic construct
GSGSPHSKAPSNQT

SEQ ID NO: 3042 - protein, 14 aa, synthetic construct
GSGSPHSKAQVGHT

SEQ ID NO: 3043 - protein, 14 aa, synthetic construct
GSGSPHSKAQRDIT

SEQ ID NO: 3044 - protein, 14 aa, synthetic construct
GSGSPHSKAQMPNT

SEQ ID NO: 3045 - protein, 14 aa, synthetic construct
GSGSPHSKARGLQT

SEQ ID NO: 3046 - protein, 14 aa, synthetic construct
GSGSPHSKLQKQQT

SEQ ID NO: 3047 - protein, 14 aa, synthetic construct
GSGSPHSKAPSLQT

SEQ ID NO: 3048 - protein, 14 aa, synthetic construct
GSGSPHSKAQRDQT

SEQ ID NO: 3049 - protein, 14 aa, synthetic construct
GSGSPHSKNRDQQT

SEQ ID NO: 3050 - protein, 14 aa, synthetic construct
GSGSPHSKAQAKGT

SEQ ID NO: 3051 - protein, 14 aa, synthetic construct
GSGSPHSKAQSAHT

SEQ ID NO: 3052 - protein, 14 aa, synthetic construct
GSGSPHSKSQNHQT

SEQ ID NO: 3053 - protein, 14 aa, synthetic construct
RSGSPHSKAQDQQT

SEQ ID NO: 3054 - protein, 14 aa, synthetic construct
GSGSPHSKAQSTMT

SEQ ID NO: 3055 - protein, 14 aa, synthetic construct
GSGSPHSKAQREMT

SEQ ID NO: 3056 - protein, 14 aa, synthetic construct
GSGSPHSKAQYRAT

SEQ ID NO: 3057 - protein, 14 aa, synthetic construct
GSGSPHSKNQWQQT

SEQ ID NO: 3058 - protein, 14 aa, synthetic construct
GSGSPHSKAQRMNT

SEQ ID NO: 3059 - protein, 14 aa, synthetic construct
GSGSPHAKAQNHQT

SEQ ID NO: 3060 - protein, 14 aa, synthetic construct
GSGSPHSKAGDSQT

SEQ ID NO: 3061 - protein, 14 aa, synthetic construct
GSGSPHSKLKSQQT

SEQ ID NO: 3062 - protein, 14 aa, synthetic construct
GSGSPHSKAQKIST

SEQ ID NO: 3063 - protein, 14 aa, synthetic construct
GSGSPHSKAPSMQT

SEQ ID NO: 3064 - protein, 14 aa, synthetic construct
GSGSPHSKASPRQT

SEQ ID NO: 3065 - protein, 14 aa, synthetic construct
GSGSPHSKRMEQQT

SEQ ID NO: 3066 - protein, 14 aa, synthetic construct
GSGSPHSKAQYQNT

SEQ ID NO: 3067 - protein, 14 aa, synthetic construct
RSGSPHSKAQNQQI

SEQ ID NO: 3068 - protein, 14 aa, synthetic construct
GSGSPHTKAQNPPT

SEQ ID NO: 3069 - protein, 14 aa, synthetic construct
GSGSPHTKAQNQQT

SEQ ID NO: 3070 - protein, 14 aa, synthetic construct
ASGSPHSKAQHQQT

SEQ ID NO: 3071 - protein, 14 aa, synthetic construct
ASGSPHSKAINQQT

SEQ ID NO: 3072 - protein, 14 aa, synthetic construct
GSGSPHSKAPNQQH

SEQ ID NO: 3073 - protein, 14 aa, synthetic construct
ASGSPHSKAQNHQT

SEQ ID NO: 3074 - protein, 14 aa, synthetic construct
GSGSPHSKAENRQT

SEQ ID NO: 3075 - protein, 14 aa, synthetic construct
GSGSPHSKVQDQQT

SEQ ID NO: 3076 - protein, 14 aa, synthetic construct
GSGSPHSKAQTQQA

SEQ ID NO: 3077 - protein, 14 aa, synthetic construct
GSGSPHSKAQNQAT

SEQ ID NO: 3078 - protein, 14 aa, synthetic construct
GHDSPHKSGQIRQT

SEQ ID NO: 3079 - protein, 14 aa, synthetic construct
GHDSPHKIGQNQHA

SEQ ID NO: 3080 - protein, 14 aa, synthetic construct
GYDSPHKSGQKQQT

SEQ ID NO: 3081 - protein, 14 aa, synthetic construct
GHDSPHKSGQNQQT

SEQ ID NO: 3082 - protein, 14 aa, synthetic construct
GHDSPHKSGQSVQT

SEQ ID NO: 3083 - protein, 14 aa, synthetic construct
GHESPHKSGRSQQT

SEQ ID NO: 3084 - protein, 14 aa, synthetic construct
GHDSPHKSGQNKLE

SEQ ID NO: 3085 - protein, 14 aa, synthetic construct
GHDSPHKTGQNQQK

SEQ ID NO: 3086 - protein, 14 aa, synthetic construct
GRGSPHKRGQNQQT

SEQ ID NO: 3087 - protein, 14 aa, synthetic construct
GHDNPHKSGQNQQT

SEQ ID NO: 3088 - protein, 14 aa, synthetic construct
GQDSPHKSGQHQQA

SEQ ID NO: 3089 - protein, 14 aa, synthetic construct
GHDSPHKSGQIQHT

SEQ ID NO: 3090 - protein, 14 aa, synthetic construct
GHDSPHKSGPRQQT

SEQ ID NO: 3091 - protein, 14 aa, synthetic construct
GHDSPHKSGHTQQT

SEQ ID NO: 3092 - protein, 14 aa, synthetic construct
GHDSPHKSGQRQHT

SEQ ID NO: 3093 - protein, 14 aa, synthetic construct
GHDSPHKSAQSQQT

SEQ ID NO: 3094 - protein, 14 aa, synthetic construct
GHESPHKSGQNQQS

SEQ ID NO: 3095 - protein, 14 aa, synthetic construct
GHDSPHKSLQNQQT

SEQ ID NO: 3096 - protein, 14 aa, synthetic construct
GHDSPHKSGRNQET

SEQ ID NO: 3097 - protein, 14 aa, synthetic construct
GHDSPHKSGQTQLT

SEQ ID NO: 3098 - protein, 14 aa, synthetic construct
GHDSPHKSEKNQQT

SEQ ID NO: 3099 - protein, 14 aa, synthetic construct
GRDSPHKSGQDQQT

SEQ ID NO: 3100 - protein, 14 aa, synthetic construct
GHDSPHKTGHNQQT

SEQ ID NO: 3101 - protein, 14 aa, synthetic construct
AHDSPHKSGQNQLT

SEQ ID NO: 3102 - protein, 14 aa, synthetic construct
GYDSPHKSGQTQQT

SEQ ID NO: 3103 - protein, 14 aa, synthetic construct
GHESPHKSGQTQQI

SEQ ID NO: 3104 - protein, 14 aa, synthetic construct
GHDSPHKSGQSKQA

SEQ ID NO: 3105 - protein, 14 aa, synthetic construct
GHESPHKSGQNQQT

SEQ ID NO: 3106 - protein, 14 aa, synthetic construct
GHDSPHKTGQNQPP

SEQ ID NO: 3107 - protein, 14 aa, synthetic construct
GHDSPHKSGQSPQT

SEQ ID NO: 3108 - protein, 14 aa, synthetic construct
GNDSPHKSVQNQQT

SEQ ID NO: 3109 - protein, 14 aa, synthetic construct
GHDSPHKSAQNYQT

SEQ ID NO: 3110 - protein, 14 aa, synthetic construct
AHDSPHKIGQNHQT

SEQ ID NO: 3111 - protein, 14 aa, synthetic construct
GHESPHKSAQNRQT

SEQ ID NO: 3112 - protein, 14 aa, synthetic construct
GHDSPHKSGQNQQG

SEQ ID NO: 3113 - protein, 14 aa, synthetic construct
GQDSPHKIGQNQQT

SEQ ID NO: 3114 - protein, 14 aa, synthetic construct
GHDSPHKSGQNHLT

SEQ ID NO: 3115 - protein, 14 aa, synthetic construct
GHDSPHKSGQYQHT

SEQ ID NO: 3116 - protein, 14 aa, synthetic construct
GNDSPHKSVQNHQT

SEQ ID NO: 3117 - protein, 14 aa, synthetic construct
GHDSPHKSGQNQWT

SEQ ID NO: 3118 - protein, 14 aa, synthetic construct
GHDSPHKSVQNQHT

SEQ ID NO: 3119 - protein, 14 aa, synthetic construct
GHDSPHKSGQNQHA

SEQ ID NO: 3120 - protein, 14 aa, synthetic construct
GHDSPHKSGQTRQT

SEQ ID NO: 3121 - protein, 14 aa, synthetic construct
GHDSPHKSGQNLHT

SEQ ID NO: 3122 - protein, 14 aa, synthetic construct
GHDSPHKSGLNQQT

SEQ ID NO: 3123 - protein, 14 aa, synthetic construct
GHDSPHKSAQNQET

SEQ ID NO: 3124 - protein, 14 aa, synthetic construct
GHDSPHKSGQHLQT

SEQ ID NO: 3125 - protein, 14 aa, synthetic construct
GHDSPHKSRLNQPT

SEQ ID NO: 3126 - protein, 14 aa, synthetic construct
GHDSPHKSGQKQQT

SEQ ID NO: 3127 - protein, 14 aa, synthetic construct
GQDSPHKSGQNQDT

SEQ ID NO: 3128 - protein, 14 aa, synthetic construct
GHDSPHKSGRNQQT

SEQ ID NO: 3129 - protein, 14 aa, synthetic construct
GHDSPHKSGQNLLT

SEQ ID NO: 3130 - protein, 14 aa, synthetic construct
GHDSPHKSGQLVIT

SEQ ID NO: 3131 - protein, 14 aa, synthetic construct
GHDSPHKSRQSQQT

SEQ ID NO: 3132 - protein, 14 aa, synthetic construct
GHDSPHKSGRTQET

SEQ ID NO: 3133 - protein, 14 aa, synthetic construct
GHDSPHKSVQTHQT

SEQ ID NO: 3134 - protein, 14 aa, synthetic construct
GHDSPHKSGQNQPA

SEQ ID NO: 3135 - protein, 14 aa, synthetic construct
KHDSPHKSGQNQQT

SEQ ID NO: 3136 - protein, 14 aa, synthetic construct
GHDSPHKSGQTQQT

SEQ ID NO: 3137 - protein, 14 aa, synthetic construct
GPDSPHKIGQNQQS

SEQ ID NO: 3138 - protein, 14 aa, synthetic construct
GHDSPHKSVQNQQT

SEQ ID NO: 3139 - protein, 14 aa, synthetic construct
GHDSPHKSRQDQHT

SEQ ID NO: 3140 - protein, 14 aa, synthetic construct
GPDSPHKSGQKQQT

SEQ ID NO: 3141 - protein, 14 aa, synthetic construct
GHDSPHKSRQSQHT

SEQ ID NO: 3142 - protein, 14 aa, synthetic construct
GHDSPHKSVQNQLT

SEQ ID NO: 3143 - protein, 14 aa, synthetic construct
AHDSPHKSGQNQQT

SEQ ID NO: 3144 - protein, 14 aa, synthetic construct
GQDSPHKSGQNQQS

SEQ ID NO: 3145 - protein, 14 aa, synthetic construct
GHDSPHKSGRNQQI

SEQ ID NO: 3146 - protein, 14 aa, synthetic construct
GYDSPHKSGQYQHT

SEQ ID NO: 3147 - protein, 14 aa, synthetic construct
GHDSPHKSRQNQQT

SEQ ID NO: 3148 - protein, 14 aa, synthetic construct
GHDSPHKSWVRQQT

SEQ ID NO: 3149 - protein, 14 aa, synthetic construct
GHESPHKSGQNQHS

SEQ ID NO: 3150 - protein, 14 aa, synthetic construct
GHDSPHKIGHNQQT

SEQ ID NO: 3151 - protein, 14 aa, synthetic construct
WHDSPHKSGQNQQT

SEQ ID NO: 3152 - protein, 14 aa, synthetic construct
RHDSPHKSGQNQQT

SEQ ID NO: 3153 - protein, 14 aa, synthetic construct
GHDSPHKSNAWQQT

SEQ ID NO: 3154 - protein, 14 aa, synthetic construct
GHDSPHKSGQSVPT

SEQ ID NO: 3155 - protein, 14 aa, synthetic construct
GHESPHKSGQNIQP

SEQ ID NO: 3156 - protein, 14 aa, synthetic construct
GHDSPHKSVQNHLN

SEQ ID NO: 3157 - protein, 14 aa, synthetic construct
GHDSPHKIGLDQQT

SEQ ID NO: 3158 - protein, 14 aa, synthetic construct
GHDSPHKRGPDQQS

SEQ ID NO: 3159 - protein, 14 aa, synthetic construct
GHDSPHKSGESQQT

SEQ ID NO: 3160 - protein, 14 aa, synthetic construct
GHDSPHKHGQNHQT

SEQ ID NO: 3161 - protein, 14 aa, synthetic construct
LHDSPHKSGQNQQT

SEQ ID NO: 3162 - protein, 14 aa, synthetic construct
GHDSPHKSVQNKQT

SEQ ID NO: 3163 - protein, 14 aa, synthetic construct
GQVSPHKSGQNQQT

SEQ ID NO: 3164 - protein, 14 aa, synthetic construct
GHDSPHKSGQRQLT

SEQ ID NO: 3165 - protein, 14 aa, synthetic construct
GHDSPHKIGQNQLT

SEQ ID NO: 3166 - protein, 14 aa, synthetic construct
GHDSPHKSGQIIVT

SEQ ID NO: 3167 - protein, 14 aa, synthetic construct
IHDSPHKSGQNQQT

SEQ ID NO: 3168 - protein, 14 aa, synthetic construct
GYDSPHKSGQKQST

SEQ ID NO: 3169 - protein, 14 aa, synthetic construct
MHDSPHKSGQNQQT

SEQ ID NO: 3170 - protein, 14 aa, synthetic construct
GDDSPHKSVQNQQT

SEQ ID NO: 3171 - protein, 14 aa, synthetic construct
GHDSPHKSVQSHQT

SEQ ID NO: 3172 - protein, 14 aa, synthetic construct
GHDSPHKSGQFVVT

SEQ ID NO: 3173 - protein, 14 aa, synthetic construct
GHDSPHKSRQNLQT

SEQ ID NO: 3174 - protein, 14 aa, synthetic construct
GHNSPHKSGQNQET

SEQ ID NO: 3175 - protein, 14 aa, synthetic construct
GHDSPHKSAQNQQI

SEQ ID NO: 3176 - protein, 14 aa, synthetic construct
NHDSPHKSGQNQQT

SEQ ID NO: 3177 - protein, 14 aa, synthetic construct
GHDSPHKSGQSQPT

SEQ ID NO: 3178 - protein, 14 aa, synthetic construct
GHESPHKSGQNEQT

SEQ ID NO: 3179 - protein, 14 aa, synthetic construct
GHDSPHKSAQNQQT

SEQ ID NO: 3180 - protein, 14 aa, synthetic construct
GHDSPHKSGQNQLT

SEQ ID NO: 3181 - protein, 14 aa, synthetic construct
GHDSPHKSAQNLLT

SEQ ID NO: 3182 - protein, 14 aa, synthetic construct
THDSPHKSGQNQQT

SEQ ID NO: 3183 - protein, 14 aa, synthetic construct
GNGSPHKRGQNQQT

SEQ ID NO: 3184 - protein, 14 aa, synthetic construct
GHDSPHKSGQSLQT

SEQ ID NO: 3185 - protein, 14 aa, synthetic construct
GHDSPHKSAQNHQT

SEQ ID NO: 3186 - protein, 14 aa, synthetic construct
GHDSPHKSGRNRQT

SEQ ID NO: 3187 - protein, 14 aa, synthetic construct
EHDSPHKSGQNQQT

SEQ ID NO: 3188 - protein, 14 aa, synthetic construct
GHDSPHKYGQNEQT

SEQ ID NO: 3189 - protein, 14 aa, synthetic construct
RHDSPHKSGHNQQT

SEQ ID NO: 3190 - protein, 14 aa, synthetic construct
GHDSPHKSQQNQQT

SEQ ID NO: 3191 - protein, 14 aa, synthetic construct
GHDSPHKSGQNQQI

SEQ ID NO: 3192 - protein, 14 aa, synthetic construct
QHDSPHKSGQNQQT

SEQ ID NO: 3193 - protein, 14 aa, synthetic construct
RHDSPHKIVQNQQT

SEQ ID NO: 3194 - protein, 14 aa, synthetic construct
YHDSPHKSGQNQQT

SEQ ID NO: 3195 - protein, 14 aa, synthetic construct
GHDSPHKSVQSKQT

SEQ ID NO: 3196 - protein, 14 aa, synthetic construct
GNDSPHKIGHNQQT

SEQ ID NO: 3197 - protein, 14 aa, synthetic construct
HHDSPHKSGQNQQT

SEQ ID NO: 3198 - protein, 14 aa, synthetic construct
GHDSPHKSGQTQQI

SEQ ID NO: 3199 - protein, 14 aa, synthetic construct
GQDSPHKSGQNPLT

SEQ ID NO: 3200 - protein, 14 aa, synthetic construct
GHDSPHKSGRDQKT

SEQ ID NO: 3201 - protein, 14 aa, synthetic construct
GHDSPHKSVHNQQN

SEQ ID NO: 3202 - protein, 14 aa, synthetic construct
GHDSPHKSGQWKRT

SEQ ID NO: 3203 - protein, 14 aa, synthetic construct
GHDSPHKSGQSQQI

SEQ ID NO: 3204 - protein, 14 aa, synthetic construct
GHDSPHKSRQAQQT

SEQ ID NO: 3205 - protein, 14 aa, synthetic construct
GHDSPHKSVQNHQI

SEQ ID NO: 3206 - protein, 14 aa, synthetic construct
GHDSPHKSKQNQQA

SEQ ID NO: 3207 - protein, 14 aa, synthetic construct
GHDSPHKSAQNQLN

SEQ ID NO: 3208 - protein, 14 aa, synthetic construct
GHDSPHKSGQTQPT

SEQ ID NO: 3209 - protein, 14 aa, synthetic construct
FHDSPHKSGQNQQT

SEQ ID NO: 3210 - protein, 14 aa, synthetic construct
GHDSPHKLWINQQT

SEQ ID NO: 3211 - protein, 14 aa, synthetic construct
GPDSPHKSGQNQQT

SEQ ID NO: 3212 - protein, 14 aa, synthetic construct
GHDSPHKSVQKQLT

SEQ ID NO: 3213 - protein, 14 aa, synthetic construct
GHDSPHKSGRNQLA

SEQ ID NO: 3214 - protein, 14 aa, synthetic construct
VHDSPHKSGQNQQS

SEQ ID NO: 3215 - protein, 14 aa, synthetic construct
GHDSPHKMGRNQQS

SEQ ID NO: 3216 - protein, 14 aa, synthetic construct
GHDSPHKSGISIQT

SEQ ID NO: 3217 - protein, 14 aa, synthetic construct
VHDSPHKSGQNQQT

SEQ ID NO: 3218 - protein, 14 aa, synthetic construct
GHDSPHKSVQNLQT

SEQ ID NO: 3219 - protein, 14 aa, synthetic construct
GHDSPHKMAHNQQT

SEQ ID NO: 3220 - protein, 14 aa, synthetic construct
GHDSPHKHGQNQQN

SEQ ID NO: 3221 - protein, 14 aa, synthetic construct
GHDSPHKSVQSQQS

SEQ ID NO: 3222 - protein, 14 aa, synthetic construct
GHDSPHKSGQTVCT

SEQ ID NO: 3223 - protein, 14 aa, synthetic construct
GQDSPHKSGQYQQI

SEQ ID NO: 3224 - protein, 14 aa, synthetic construct
GHDSPHKSGQQIMT

SEQ ID NO: 3225 - protein, 14 aa, synthetic construct
GHDSPHKSRQNEQS

SEQ ID NO: 3226 - protein, 14 aa, synthetic construct
GHDSPHKSGLNHQT

SEQ ID NO: 3227 - protein, 14 aa, synthetic construct
GYDSPHKSGQNQQT

SEQ ID NO: 3228 - protein, 14 aa, synthetic construct
GHDSPHKSGQNLQT

SEQ ID NO: 3229 - protein, 14 aa, synthetic construct
GHDSPHKSRQDQQT

SEQ ID NO: 3230 - protein, 14 aa, synthetic construct
GDDSPHKSGQKQLT

SEQ ID NO: 3231 - protein, 14 aa, synthetic construct
GDDSPHKSGHNQQT

SEQ ID NO: 3232 - protein, 14 aa, synthetic construct
GHDSPHKSGQMIHT

SEQ ID NO: 3233 - protein, 14 aa, synthetic construct
GHDSPHKSGRNHQS

SEQ ID NO: 3234 - protein, 14 aa, synthetic construct
GHDSPHKSVQNRQT

SEQ ID NO: 3235 - protein, 14 aa, synthetic construct
GHDSPHKSGQKMNT

SEQ ID NO: 3236 - protein, 14 aa, synthetic construct
GHDSPHKSGQSQQN

SEQ ID NO: 3237 - protein, 14 aa, synthetic construct
GHDSPHKSGQYQHA

SEQ ID NO: 3238 - skipped

SEQ ID NO: 3239 - protein, 18 aa, synthetic construct
KTIIGSGSPHSKAQNRHT

SEQ ID NO: 3240 - protein, 18 aa, synthetic construct
KTFPGSGSPHSKVQNQQT

SEQ ID NO: 3241 - protein, 18 aa, synthetic construct
KTEKMSGSPHSKAQNQQT

SEQ ID NO: 3242 - protein, 18 aa, synthetic construct
KTVNGSGSPHSKARDQQT

SEQ ID NO: 3243 - protein, 18 aa, synthetic construct
KTFNGSGSPHSKAPNLQT

SEQ ID NO: 3244 - protein, 18 aa, synthetic construct
KTEKTSGSPHSKAQNQQT

SEQ ID NO: 3245 - protein, 18 aa, synthetic construct
KTINGSGSPHSKAHVRQT

SEQ ID NO: 3246 - protein, 18 aa, synthetic construct
KTVNGSGSPHSKAPNQHT

SEQ ID NO: 3247 - protein, 18 aa, synthetic construct
KTEKISGSPHSKAQNQQT

SEQ ID NO: 3248 - protein, 18 aa, synthetic construct
KTVNGSGSPHSKTQSQQT

SEQ ID NO: 3249 - protein, 18 aa, synthetic construct
TTINGSGSPHSKAQNQQT

SEQ ID NO: 3250 - protein, 18 aa, synthetic construct
KSINESGSPHSKAQNQQI

SEQ ID NO: 3251 - protein, 18 aa, synthetic construct
KTERTSGSPHSKAQNQQT

SEQ ID NO: 3252 - protein, 18 aa, synthetic construct
KTINGSGSPHSKAQPAKT

SEQ ID NO: 3253 - protein, 18 aa, synthetic construct
KTEKSSGSPHSKAQNQQT

SEQ ID NO: 3254 - protein, 18 aa, synthetic construct
KTEKGSGSPHSKAQNQQT

SEQ ID NO: 3255 - protein, 18 aa, synthetic construct
KTINGSGSPHSKSQTQQN

SEQ ID NO: 3256 - protein, 18 aa, synthetic construct
KTERISGSPHSKAQNQQT

SEQ ID NO: 3257 - protein, 18 aa, synthetic construct
KTERASGSPHSKAQNQQT

SEQ ID NO: 3258 - protein, 18 aa, synthetic construct
KELHGSGSPHSKAQNQQT

SEQ ID NO: 3259 - protein, 18 aa, synthetic construct
KAINGSGSPHSKAQNLAT

SEQ ID NO: 3260 - protein, 18 aa, synthetic construct
KTVNGSGSPHSKSQNQLT

SEQ ID NO: 3261 - protein, 18 aa, synthetic construct
KTERNSGSPHSKAQNQQT

SEQ ID NO: 3262 - protein, 18 aa, synthetic construct
KTFNGSGSPHSKAQGQQT

SEQ ID NO: 3263 - protein, 18 aa, synthetic construct
KTERVSGSPHSKAQNQQT

SEQ ID NO: 3264 - protein, 18 aa, synthetic construct
KTINGSGSPHSKALNRQS

SEQ ID NO: 3265 - protein, 18 aa, synthetic construct
KTERLSGSPHSKAQNQQT

SEQ ID NO: 3266 - protein, 18 aa, synthetic construct
KTDNGSGSPHSKAHNQQT

SEQ ID NO: 3267 - protein, 18 aa, synthetic construct
KTFHGSGSPHSKTQNQQT

SEQ ID NO: 3268 - protein, 18 aa, synthetic construct
KTSNGSGSPHSKAQNPPT

SEQ ID NO: 3269 - protein, 18 aa, synthetic construct
ETINGSGSPHSKAQNLQT

SEQ ID NO: 3270 - protein, 18 aa, synthetic construct
NTINGSGSPHSKAQNQQT

SEQ ID NO: 3271 - protein, 18 aa, synthetic construct
KTENMSGSPHSKAQNQQT

SEQ ID NO: 3272 - protein, 18 aa, synthetic construct
KTENVSGSPHSKAQNQQT

SEQ ID NO: 3273 - protein, 18 aa, synthetic construct
KTSSGSGSPHSKAQYQQT

SEQ ID NO: 3274 - protein, 18 aa, synthetic construct
KTEKVSGSPHSKAQNQQT

SEQ ID NO: 3275 - protein, 18 aa, synthetic construct
KAINGSGSPHSKAQDQET

SEQ ID NO: 3276 - protein, 18 aa, synthetic construct
KTCNKSGSPHSKAQNQQT

SEQ ID NO: 3277 - protein, 18 aa, synthetic construct
KTEHLSGSPHSKAQNQQT

SEQ ID NO: 3278 - protein, 18 aa, synthetic construct
KAEMGSGSPHSKAQNQQT

SEQ ID NO: 3279 - protein, 18 aa, synthetic construct
KATNGSGSPHSKAQNHQT

SEQ ID NO: 3280 - protein, 18 aa, synthetic construct
KAIKGSGSPHSKAQDQQT

SEQ ID NO: 3281 - protein, 18 aa, synthetic construct
KTINGSGSPHSKGHWQQT

SEQ ID NO: 3282 - protein, 18 aa, synthetic construct
KTDKTSGSPHSKAQNQQT

SEQ ID NO: 3283 - protein, 18 aa, synthetic construct
KTFKGSGSPHSKAPNQQT

SEQ ID NO: 3284 - protein, 18 aa, synthetic construct
KTVNGSGSPHSKAQNQLI

SEQ ID NO: 3285 - protein, 18 aa, synthetic construct
KTINGSGSPHSKRPEQQT

SEQ ID NO: 3286 - protein, 18 aa, synthetic construct
KTINGSGSPHSKAQRTMT

SEQ ID NO: 3287 - protein, 18 aa, synthetic construct
KTEKASGSPHSKAQNQQT

SEQ ID NO: 3288 - protein, 18 aa, synthetic construct
KSDQGSGSPHSKAQNQQT

SEQ ID NO: 3289 - protein, 18 aa, synthetic construct
KTEITSGSPHSKAQNQQT

SEQ ID NO: 3290 - protein, 18 aa, synthetic construct
KTDKSSGSPHSKAQNQQT

SEQ ID NO: 3291 - protein, 18 aa, synthetic construct
KTIDGSGSPHSKAQNQQH

SEQ ID NO: 3292 - protein, 18 aa, synthetic construct
KNTNGSGSPHSKAQNQQT

SEQ ID NO: 3293 - protein, 18 aa, synthetic construct
KTETHSGSPHSKAQNQQT

SEQ ID NO: 3294 - protein, 18 aa, synthetic construct
KTINGSGSPHSKALHQHT

SEQ ID NO: 3295 - protein, 18 aa, synthetic construct
KTINGSGSPHSKAQHRIT

SEQ ID NO: 3296 - protein, 18 aa, synthetic construct
KTINGSGSPHSKAQYIHT

SEQ ID NO: 3297 - protein, 18 aa, synthetic construct
KTENISGSPHSKAQNQQT

SEQ ID NO: 3298 - protein, 18 aa, synthetic construct
KTINGSGSPHSKAQKFET

SEQ ID NO: 3299 - protein, 18 aa, synthetic construct
KTSNESGSPHSKAQNHQT

SEQ ID NO: 3300 - protein, 18 aa, synthetic construct
KTINGSGSPHSKAQFPST

SEQ ID NO: 3301 - protein, 18 aa, synthetic construct
KTERPSGSPHSKAQNQQT

SEQ ID NO: 3302 - protein, 18 aa, synthetic construct
KTERMSGSPHSKAQNQQT

SEQ ID NO: 3303 - protein, 18 aa, synthetic construct
KTERSSGSPHSKAQNQQT

SEQ ID NO: 3304 - protein, 18 aa, synthetic construct
KTELHSGSPHSKAQNQQT

SEQ ID NO: 3305 - protein, 18 aa, synthetic construct
KTELTSGSPHSKAQNQQT

SEQ ID NO: 3306 - protein, 18 aa, synthetic construct
KTINGSGSPHSKAHNQQR

SEQ ID NO: 3307 - protein, 18 aa, synthetic construct
KTINGSGSPHSKAQAIKT

SEQ ID NO: 3308 - protein, 18 aa, synthetic construct
KTENTSGSPHSKAQNQQT

SEQ ID NO: 3309 - protein, 18 aa, synthetic construct
KTIDGSGSPHSKGQNRQT

SEQ ID NO: 3310 - protein, 18 aa, synthetic construct
KNINGSGSPHSKAQSQQT

SEQ ID NO: 3311 - protein, 18 aa, synthetic construct
KTSNASGSPHSKAQNQLT

SEQ ID NO: 3312 - protein, 18 aa, synthetic construct
KTEARSGSPHSKAQNQQT

SEQ ID NO: 3313 - protein, 18 aa, synthetic construct
KTEKNSGSPHSKAQNQQT

SEQ ID NO: 3314 - protein, 18 aa, synthetic construct
KTANGSGSPHSKAQYQQT

SEQ ID NO: 3315 - protein, 18 aa, synthetic construct
KTVNGSGSPHSKAQYQHT

SEQ ID NO: 3316 - protein, 18 aa, synthetic construct
KTINGSGSPHTKAQNPQS

SEQ ID NO: 3317 - protein, 18 aa, synthetic construct
KTINGSGSPHSKGQNPPT

SEQ ID NO: 3318 - protein, 18 aa, synthetic construct
KTIIGSGSPHSKAQHQLT

SEQ ID NO: 3319 - protein, 18 aa, synthetic construct
KTINGSGSPHSKAQSPPT

SEQ ID NO: 3320 - protein, 18 aa, synthetic construct
NTIYGSGSPHSKAQNQQT

SEQ ID NO: 3321 - protein, 18 aa, synthetic construct
KTINGSGSPHSKAQAKLT

SEQ ID NO: 3322 - protein, 18 aa, synthetic construct
KTDKNSGSPHSKAQNQQT

SEQ ID NO: 3323 - protein, 18 aa, synthetic construct
KTINGSGSPHSKTKSQQT

SEQ ID NO: 3324 - protein, 18 aa, synthetic construct
KTINGSGSPHSKAQDRPT

SEQ ID NO: 3325 - protein, 18 aa, synthetic construct
KTINGSGSPHSKAQSQQL

SEQ ID NO: 3326 - protein, 18 aa, synthetic construct
KTENLSGSPHSKAQNQQT

SEQ ID NO: 3327 - protein, 18 aa, synthetic construct
KTINGSGSPHSKAQAFHT

SEQ ID NO: 3328 - protein, 18 aa, synthetic construct
KTINGSGSPHSKAQKQQD

SEQ ID NO: 3329 - protein, 18 aa, synthetic construct
KTFSGSGSPHSKAQNLQT

SEQ ID NO: 3330 - protein, 18 aa, synthetic construct
KAINGSGSPHSKAQNAQT

SEQ ID NO: 3331 - protein, 18 aa, synthetic construct
KTESWSGSPHSKAQNQQT

SEQ ID NO: 3332 - protein, 18 aa, synthetic construct
KTTNGSGSPHSKAHNQLT

SEQ ID NO: 3333 - protein, 18 aa, synthetic construct
KTEDKSGSPHSKAQNQQT

SEQ ID NO: 3334 - protein, 18 aa, synthetic construct
KTESASGSPHSKAQNQQT

SEQ ID NO: 3335 - protein, 18 aa, synthetic construct
KTNNGSGSPHSKAQNQQY

SEQ ID NO: 3336 - protein, 18 aa, synthetic construct
KTDKMSGSPHSKAQNQQT

SEQ ID NO: 3337 - protein, 18 aa, synthetic construct
KEVHGSGSPHSKAQNQQT

SEQ ID NO: 3338 - protein, 18 aa, synthetic construct
KTINGSGSPHSKAQKLNT

SEQ ID NO: 3339 - protein, 18 aa, synthetic construct
KTTNGSGSPHSKAQYQHT

SEQ ID NO: 3340 - protein, 18 aa, synthetic construct
KTISGSGSPHSKAQYQHT

SEQ ID NO: 3341 - protein, 18 aa, synthetic construct
KTESTSGSPHSKAQNQQT

SEQ ID NO: 3342 - protein, 18 aa, synthetic construct
KTINGSGSPHSKSQNVQT

SEQ ID NO: 3343 - protein, 18 aa, synthetic construct
KSINGSGSPHSKAQAQQT

SEQ ID NO: 3344 - protein, 18 aa, synthetic construct
KTVNGSGSPHSKAQNLQA

SEQ ID NO: 3345 - protein, 18 aa, synthetic construct
KTVRDSGSPHSKAQNQQT

SEQ ID NO: 3346 - protein, 18 aa, synthetic construct
KTFNASGSPHSKAPNQQT

SEQ ID NO: 3347 - protein, 18 aa, synthetic construct
KTDRMSGSPHSKAQNQQT

SEQ ID NO: 3348 - protein, 18 aa, synthetic construct
KTINGSGSPHSKAQTPPT

SEQ ID NO: 3349 - protein, 18 aa, synthetic construct
ETIKGSGSPHSKAQNQQT

SEQ ID NO: 3350 - protein, 18 aa, synthetic construct
KNHIGSGSPHSKAQNQQT

SEQ ID NO: 3351 - protein, 18 aa, synthetic construct
KTINGSGSPHSKAQYQHA

SEQ ID NO: 3352 - protein, 18 aa, synthetic construct
KTINGSGSPHSKAQGQQA

SEQ ID NO: 3353 - protein, 18 aa, synthetic construct
KTFNGSGSPHNKAQNHQT

SEQ ID NO: 3354 - protein, 18 aa, synthetic construct
KESDGSGSPHSKAQNQQT

SEQ ID NO: 3355 - protein, 18 aa, synthetic construct
KTINGSGSPHSKAQPPAT

SEQ ID NO: 3356 - protein, 18 aa, synthetic construct
KTINGSGSPHSKAQERPT

SEQ ID NO: 3357 - protein, 18 aa, synthetic construct
KTIKGSGSPHSKAQDLQT

SEQ ID NO: 3358 - protein, 18 aa, synthetic construct
KTDLKSGSPHSKAQNQQT

SEQ ID NO: 3359 - protein, 18 aa, synthetic construct
KTINGSGSPHSKAQAMHT

SEQ ID NO: 3360 - protein, 18 aa, synthetic construct
KTVPNSGSPHSKAQNQQT

SEQ ID NO: 3361 - protein, 18 aa, synthetic construct
KTVIGSGSPHSKALNQQT

SEQ ID NO: 3362 - protein, 18 aa, synthetic construct
KTINGSGSPHSKAQHPST

SEQ ID NO: 3363 - protein, 18 aa, synthetic construct
KTINGSGSPHSKAPGLQT

SEQ ID NO: 3364 - protein, 18 aa, synthetic construct
KTINGSGSPHSKAQGIRT

SEQ ID NO: 3365 - protein, 18 aa, synthetic construct
KTESHSGSPHSKAQNQQT

SEQ ID NO: 3366 - protein, 18 aa, synthetic construct
KTINGSGSPHSKAQAPAT

SEQ ID NO: 3367 - protein, 18 aa, synthetic construct
KTINGSGSPHSKSQSQQI

SEQ ID NO: 3368 - protein, 18 aa, synthetic construct
KAEHGSGSPHSKAQNQQT

SEQ ID NO: 3369 - protein, 18 aa, synthetic construct
KTEDRSGSPHSKAQNQQT

SEQ ID NO: 3370 - protein, 18 aa, synthetic construct
KNCLGSGSPHSKAQNQQT

SEQ ID NO: 3371 - protein, 18 aa, synthetic construct
KTDRGSGSPHSKAQNQQT

SEQ ID NO: 3372 - protein, 18 aa, synthetic construct
KTINGSGSPHSKAQIPPT

SEQ ID NO: 3373 - protein, 18 aa, synthetic construct
KTVKGSGSPHSKAQDQQT

SEQ ID NO: 3374 - protein, 18 aa, synthetic construct
KNADGSGSPHSKAQNQQT

SEQ ID NO: 3375 - protein, 18 aa, synthetic construct
KTDKVSGSPHSKAQNQQT

SEQ ID NO: 3376 - protein, 18 aa, synthetic construct
KTITGSGSPHSKAQTQLT

SEQ ID NO: 3377 - protein, 18 aa, synthetic construct
KTINGSGSPHSKAQAPST

SEQ ID NO: 3378 - protein, 18 aa, synthetic construct
KNCVGSGSPHSKAQNQQT

SEQ ID NO: 3379 - protein, 18 aa, synthetic construct
KTVKDSGSPHSKAQNQQT

SEQ ID NO: 3380 - protein, 18 aa, synthetic construct
KNALGSGSPHSKAQNQQT

SEQ ID NO: 3381 - protein, 18 aa, synthetic construct
KVINGSGSPHSKGQNQQT

SEQ ID NO: 3382 - protein, 18 aa, synthetic construct
KTSNASGSPHSKAHNQQT

SEQ ID NO: 3383 - protein, 18 aa, synthetic construct
KTINGSGSPHSKAQNTYA

SEQ ID NO: 3384 - protein, 18 aa, synthetic construct
KTINGSGSPHSKSQNQHI

SEQ ID NO: 3385 - protein, 18 aa, synthetic construct
KTEFVSGSPHSKAQNQQT

SEQ ID NO: 3386 - protein, 18 aa, synthetic construct
KTVNGSGSPHSKAQNHLT

SEQ ID NO: 3387 - protein, 18 aa, synthetic construct
KTREISGSPHSKAQNQQT

SEQ ID NO: 3388 - protein, 18 aa, synthetic construct
KTINGSGSPHSKAQIGMT

SEQ ID NO: 3389 - protein, 18 aa, synthetic construct
KTIDGSGSPHSKALNKQT

SEQ ID NO: 3390 - protein, 18 aa, synthetic construct
KQGEGSGSPHSKAQNQQT

SEQ ID NO: 3391 - protein, 18 aa, synthetic construct
KTVNGSGSPHSKAQLQQT

SEQ ID NO: 3392 - protein, 18 aa, synthetic construct
KSINGSGSPHSKTQSQQT

SEQ ID NO: 3393 - protein, 18 aa, synthetic construct
KSEKGSGSPHSKAQNQQT

SEQ ID NO: 3394 - protein, 18 aa, synthetic construct
KNVNGSGSPHSKAQNQQT

SEQ ID NO: 3395 - protein, 18 aa, synthetic construct
KGGEGSGSPHSKAQNQQT

SEQ ID NO: 3396 - protein, 18 aa, synthetic construct
KTINGSGSPHSKAQRMST

SEQ ID NO: 3397 - protein, 18 aa, synthetic construct
KTINGSGSPHSKAQGILT

SEQ ID NO: 3398 - protein, 18 aa, synthetic construct
KEFVGSGSPHSKAQNQQT

SEQ ID NO: 3399 - protein, 18 aa, synthetic construct
KTIIGSGSPHSKAQDRQT

SEQ ID NO: 3400 - protein, 18 aa, synthetic construct
KSDKGSGSPHSKAQNQQT

SEQ ID NO: 3401 - protein, 18 aa, synthetic construct
KTEQVSGSPHSKAQNQQT

SEQ ID NO: 3402 - protein, 18 aa, synthetic construct
KTEHVSGSPHSKAQNQQT

SEQ ID NO: 3403 - protein, 18 aa, synthetic construct
KTINGSGSPHSKARDWQT

SEQ ID NO: 3404 - protein, 18 aa, synthetic construct
KTENASGSPHSKAQNQQT

SEQ ID NO: 3405 - protein, 18 aa, synthetic construct
KEVQGSGSPHSKAQNQQT

SEQ ID NO: 3406 - protein, 18 aa, synthetic construct
KTINGSGSPHSKAQNTHD

SEQ ID NO: 3407 - protein, 18 aa, synthetic construct
KTINGSGSPHSKAPNLQI

SEQ ID NO: 3408 - protein, 18 aa, synthetic construct
KTINGSGSPHSKAQERST

SEQ ID NO: 3409 - protein, 18 aa, synthetic construct
KTSNGSGSPHSKAQNYQT

SEQ ID NO: 3410 - protein, 18 aa, synthetic construct
KTEYISGSPHSKAQNQQT

SEQ ID NO: 3411 - protein, 18 aa, synthetic construct
KTINGSGSPHSKAQRTCT

SEQ ID NO: 3412 - protein, 18 aa, synthetic construct
KTINGSGSPHSKAQIGHT

SEQ ID NO: 3413 - protein, 18 aa, synthetic construct
KNCWGSGSPHSKAQNQQT

SEQ ID NO: 3414 - protein, 18 aa, synthetic construct
KTINGSGSPHSKAQGAIT

SEQ ID NO: 3415 - protein, 18 aa, synthetic construct
KTDVNSGSPHSKAQNQQT

SEQ ID NO: 3416 - protein, 18 aa, synthetic construct
KSDIGSGSPHSKAQNQQT

SEQ ID NO: 3417 - protein, 18 aa, synthetic construct
KTINGSGSPHSKAQVPPT

SEQ ID NO: 3418 - protein, 18 aa, synthetic construct
KTINGSGSPHSKAQVQQI

SEQ ID NO: 3419 - protein, 18 aa, synthetic construct
KTINGSGSPHSKALMRQT

SEQ ID NO: 3420 - protein, 18 aa, synthetic construct
KTINGSGSPHSKAQYSVT

SEQ ID NO: 3421 - protein, 18 aa, synthetic construct
KNSIGSGSPHSKAQNQQT

SEQ ID NO: 3422 - protein, 18 aa, synthetic construct
KTINGSGSPHSKVPNLQT

SEQ ID NO: 3423 - protein, 18 aa, synthetic construct
KAINGSGSPHSKAQSQQI

SEQ ID NO: 3424 - protein, 18 aa, synthetic construct
KTINGSGSPHSKAQAITT

SEQ ID NO: 3425 - protein, 18 aa, synthetic construct
KTINGSGSPHSKAQKTLT

SEQ ID NO: 3426 - protein, 18 aa, synthetic construct
KTVNGSGSPHSKAQNQWT

SEQ ID NO: 3427 - protein, 18 aa, synthetic construct
KTINGSGSPHSKAQLHHT

SEQ ID NO: 3428 - protein, 18 aa, synthetic construct
KTEQTSGSPHSKAQNQQT

SEQ ID NO: 3429 - protein, 18 aa, synthetic construct
KTINGSGSPHSKAQNIII

SEQ ID NO: 3430 - protein, 18 aa, synthetic construct
KNSLGSGSPHSKAQNQQT

SEQ ID NO: 3431 - protein, 18 aa, synthetic construct
KTINGSGSPHSKAQGHHT

SEQ ID NO: 3432 - protein, 18 aa, synthetic construct
KTDRTSGSPHSKAQNQQT

SEQ ID NO: 3433 - protein, 18 aa, synthetic construct
KTINGSGSPHSKAQSKVT

SEQ ID NO: 3434 - protein, 18 aa, synthetic construct
KEVVGSGSPHSKAQNQQT

SEQ ID NO: 3435 - protein, 18 aa, synthetic construct
KTINGSGSPHSKAQLPST

SEQ ID NO: 3436 - protein, 18 aa, synthetic construct
KTINGSGSPHSKAIGKQT

SEQ ID NO: 3437 - protein, 18 aa, synthetic construct
KTEPTSGSPHSKAQNQQT

SEQ ID NO: 3438 - protein, 18 aa, synthetic construct
KTINGSGSPHSKAQAIHT

SEQ ID NO: 3439 - protein, 18 aa, synthetic construct
KTINGSGSPHSKAQHGLT

SEQ ID NO: 3440 - protein, 18 aa, synthetic construct
KSELGSGSPHSKAQNQQT

SEQ ID NO: 3441 - protein, 18 aa, synthetic construct
KTINGSGSPHSKAQFMCT

SEQ ID NO: 3442 - protein, 18 aa, synthetic construct
KTINVSGSPHSKAQGQQT

SEQ ID NO: 3443 - protein, 18 aa, synthetic construct
KTVNGSGSPHSKAQHLQT

SEQ ID NO: 3444 - protein, 18 aa, synthetic construct
KTINGSGSPHSKTQNHQN

SEQ ID NO: 3445 - protein, 18 aa, synthetic construct
KTINGSGSPHSKAQPART

SEQ ID NO: 3446 - protein, 18 aa, synthetic construct
KTVNGSGSPHSKAQSLQT

SEQ ID NO: 3447 - protein, 18 aa, synthetic construct
KTINGSGSPHSKSQSQLT

SEQ ID NO: 3448 - protein, 18 aa, synthetic construct
KTWQNSGSPHSKAQNQQT

SEQ ID NO: 3449 - protein, 18 aa, synthetic construct
KTINGSGSPHSKAQDRQS

SEQ ID NO: 3450 - protein, 18 aa, synthetic construct
KTINGSGSPHSKAQMPST

SEQ ID NO: 3451 - protein, 18 aa, synthetic construct
KTINGSGSPHSKAQGSLT

SEQ ID NO: 3452 - protein, 18 aa, synthetic construct
KTEVTSGSPHSKAQNQQT

SEQ ID NO: 3453 - protein, 18 aa, synthetic construct
KTVIGSGSPHSKSQNQQT

SEQ ID NO: 3454 - protein, 18 aa, synthetic construct
KAVNVSGSPHSKAQNQQT

SEQ ID NO: 3455 - protein, 18 aa, synthetic construct
KTDRNSGSPHSKAQNQQT

SEQ ID NO: 3456 - protein, 18 aa, synthetic construct
KTINGSGSPHSKAQVPAT

SEQ ID NO: 3457 - protein, 18 aa, synthetic construct
KGVLGSGSPHSKAQNQQT

SEQ ID NO: 3458 - protein, 18 aa, synthetic construct
KAINGSGSPHSKAQDKQT

SEQ ID NO: 3459 - protein, 18 aa, synthetic construct
KTSNGSGSPHSKAHYQQT

SEQ ID NO: 3460 - protein, 18 aa, synthetic construct
KTINGSGSPHSKAQVPST

SEQ ID NO: 3461 - protein, 18 aa, synthetic construct
KTELRSGSPHSKAQNQQT

SEQ ID NO: 3462 - protein, 18 aa, synthetic construct
KNINGSGSPHSKAQNHQT

SEQ ID NO: 3463 - protein, 18 aa, synthetic construct
KTINGSGSPHSKARGEQT

SEQ ID NO: 3464 - protein, 18 aa, synthetic construct
KTEDLSGSPHSKAQNQQT

SEQ ID NO: 3465 - protein, 18 aa, synthetic construct
KTINGSGSPHSKAPGQQT

SEQ ID NO: 3466 - protein, 18 aa, synthetic construct
KTINGSGSPHSKAQSLQI

SEQ ID NO: 3467 - protein, 18 aa, synthetic construct
KTINGSGSPHSKRLEQQT

SEQ ID NO: 3468 - protein, 18 aa, synthetic construct
KTERGSGSPHSKAQNQQT

SEQ ID NO: 3469 - protein, 18 aa, synthetic construct
KTVNGSGSPHSKAPNQQT

SEQ ID NO: 3470 - protein, 18 aa, synthetic construct
KTSNGSGSPHSKAQNQST

SEQ ID NO: 3471 - protein, 18 aa, synthetic construct
KTINGSGSPHSKAQKVIT

SEQ ID NO: 3472 - protein, 18 aa, synthetic construct
KTEGISGSPHSKAQNQQT

SEQ ID NO: 3473 - protein, 18 aa, synthetic construct
KTINGSGSPHSKAQNNDQ

SEQ ID NO: 3474 - protein, 18 aa, synthetic construct
KTINGSGSPHSKAQSVHT

SEQ ID NO: 3475 - protein, 18 aa, synthetic construct
KTINGSGSPHSKAQPLGT

SEQ ID NO: 3476 - protein, 18 aa, synthetic construct
KTCNASGSPHSKAQNQQT

SEQ ID NO: 3477 - protein, 18 aa, synthetic construct
KAINGSGSPHSKAHNQET

SEQ ID NO: 3478 - protein, 18 aa, synthetic construct
KTEGLSGSPHSKAQNQQT

SEQ ID NO: 3479 - protein, 18 aa, synthetic construct
KTRDASGSPHSKAQNQQT

SEQ ID NO: 3480 - protein, 18 aa, synthetic construct
KTSNGSGSPHSKAQNLQI

SEQ ID NO: 3481 - protein, 18 aa, synthetic construct
KTGNGSGSPHSKAQIQQT

SEQ ID NO: 3482 - protein, 18 aa, synthetic construct
KTDRSSGSPHSKAQNQQT

SEQ ID NO: 3483 - protein, 18 aa, synthetic construct
KTINGSGSPHSKAQVRNT

SEQ ID NO: 3484 - protein, 18 aa, synthetic construct
KTINGSGSPHSKAPSNQT

SEQ ID NO: 3485 - protein, 18 aa, synthetic construct
KTINGSGSPHSKAQVGHT

SEQ ID NO: 3486 - protein, 18 aa, synthetic construct
KNAIGSGSPHSKAQNQQT

SEQ ID NO: 3487 - protein, 18 aa, synthetic construct
KAENGSGSPHSKAQNQQT

SEQ ID NO: 3488 - protein, 18 aa, synthetic construct
KTINGSGSPHSKAQRDIT

SEQ ID NO: 3489 - protein, 18 aa, synthetic construct
KTINGSGSPHSKAQMPNT

SEQ ID NO: 3490 - protein, 18 aa, synthetic construct
KTVNGSGSPHSKSQNQQT

SEQ ID NO: 3491 - protein, 18 aa, synthetic construct
KTINGSGSPHSKARGLQT

SEQ ID NO: 3492 - protein, 18 aa, synthetic construct
KTELGSGSPHSKAQNQQT

SEQ ID NO: 3493 - protein, 18 aa, synthetic construct
KAETGSGSPHSKAQNQQT

SEQ ID NO: 3494 - protein, 18 aa, synthetic construct
KTINGSGSPHSKLQKQQT

SEQ ID NO: 3495 - protein, 18 aa, synthetic construct
KTINGSGSPHSKAPSLQT

SEQ ID NO: 3496 - protein, 18 aa, synthetic construct
KTINGSGSPHSKAQRDQT

SEQ ID NO: 3497 - protein, 18 aa, synthetic construct
KTDVGSGSPHSKAQNQQT

SEQ ID NO: 3498 - protein, 18 aa, synthetic construct
KTINGSGSPHSKNRDQQT

SEQ ID NO: 3499 - protein, 18 aa, synthetic construct
KSINGSGSPHSKAPNLQT

SEQ ID NO: 3500 - protein, 18 aa, synthetic construct
KTINGSGSPHSKAQAKGT

SEQ ID NO: 3501 - protein, 18 aa, synthetic construct
KTVNGSGSPHSKAQDKQT

SEQ ID NO: 3502 - protein, 18 aa, synthetic construct
KTINGSGSPHSKAQSAHT

SEQ ID NO: 3503 - protein, 18 aa, synthetic construct
KTVPTSGSPHSKAQNQQT

SEQ ID NO: 3504 - protein, 18 aa, synthetic construct
KTIDGSGSPHSKSQNHQT

SEQ ID NO: 3505 - protein, 18 aa, synthetic construct
KTDVKSGSPHSKAQNQQT

SEQ ID NO: 3506 - protein, 18 aa, synthetic construct
KAINRSGSPHSKAQDQQT

SEQ ID NO: 3507 - protein, 18 aa, synthetic construct
KTINGSGSPHSKAQSTMT

SEQ ID NO: 3508 - protein, 18 aa, synthetic construct
KTVNASGSPHSKAQNQLT

SEQ ID NO: 3509 - protein, 18 aa, synthetic construct
KTINGSGSPHSKAQREMT

SEQ ID NO: 3510 - protein, 18 aa, synthetic construct
KTVHGSGSPHSKAQSQQT

SEQ ID NO: 3511 - protein, 18 aa, synthetic construct
KTINGSGSPHSKAQYRAT

SEQ ID NO: 3512 - protein, 18 aa, synthetic construct
KTEPMSGSPHSKAQNQQT

SEQ ID NO: 3513 - protein, 18 aa, synthetic construct
KTINGSGSPHSKNQWQQT

SEQ ID NO: 3514 - protein, 18 aa, synthetic construct
KETAGSGSPHSKAQNQQT

SEQ ID NO: 3515 - protein, 18 aa, synthetic construct
KTINGSGSPHSKAQRMNT

SEQ ID NO: 3516 - protein, 18 aa, synthetic construct
KNNLGSGSPHSKAQNQQT

SEQ ID NO: 3517 - protein, 18 aa, synthetic construct
KTINGSGSPHAKAQNHQT

SEQ ID NO: 3518 - protein, 18 aa, synthetic construct
KTINGSGSPHSKAGDSQT

SEQ ID NO: 3519 - protein, 18 aa, synthetic construct
KTINGSGSPHSKLKSQQT

SEQ ID NO: 3520 - protein, 18 aa, synthetic construct
KTINGSGSPHSKAQKIST

SEQ ID NO: 3521 - protein, 18 aa, synthetic construct
KTEYNSGSPHSKAQNQQT

SEQ ID NO: 3522 - protein, 18 aa, synthetic construct
KTINGSGSPHSKAPSMQT

SEQ ID NO: 3523 - protein, 18 aa, synthetic construct
EAINGSGSPHSKAQNQQT

SEQ ID NO: 3524 - protein, 18 aa, synthetic construct
KTINGSGSPHSKASPRQT

SEQ ID NO: 3525 - protein, 18 aa, synthetic construct
KTINGSGSPHSKRMEQQT

SEQ ID NO: 3526 - protein, 18 aa, synthetic construct
KTINGSGSPHSKAQYQNT

SEQ ID NO: 3527 - protein, 18 aa, synthetic construct
KEINGRGSPHSKAQNQQT

SEQ ID NO: 3528 - protein, 18 aa, synthetic construct
KTVNRNGSPHSKAQNQQT

SEQ ID NO: 3529 - protein, 18 aa, synthetic construct
KTINGPGSPHSKAHNQQT

SEQ ID NO: 3530 - protein, 18 aa, synthetic construct
KTSYGNGSPHSKAQNQQT

SEQ ID NO: 3531 - protein, 18 aa, synthetic construct
KSVNGNGSPHSKAQNQQT

SEQ ID NO: 3532 - protein, 18 aa, synthetic construct
KTINGSGSPHGWVQNQQT

SEQ ID NO: 3533 - protein, 18 aa, synthetic construct
KTINGGGSPHSKAQTQQI

SEQ ID NO: 3534 - protein, 18 aa, synthetic construct
KTVHGNGSPHSKAQNQQT

SEQ ID NO: 3535 - protein, 18 aa, synthetic construct
KTINGGGSPHSKAQNQQC

SEQ ID NO: 3536 - protein, 18 aa, synthetic construct
KTIDGGGSPHSKAQNKQT

SEQ ID NO: 3537 - protein, 18 aa, synthetic construct
KTINGGGSPHSKAQNQLI

SEQ ID NO: 3538 - protein, 18 aa, synthetic construct
KNINGGGSPHSKAQNQQT

SEQ ID NO: 3539 - protein, 18 aa, synthetic construct
KTINGGGSPHSKSQNQLT

SEQ ID NO: 3540 - protein, 18 aa, synthetic construct
KTVNGNGSPHSKAQNKQT

SEQ ID NO: 3541 - protein, 18 aa, synthetic construct
KTVNGNGSPHSKAQNQHT

SEQ ID NO: 3542 - protein, 18 aa, synthetic construct
KTINGGGSPHSKALNQQN

SEQ ID NO: 3543 - protein, 18 aa, synthetic construct
KTINGTGSPHSKAQNHQI

SEQ ID NO: 3544 - protein, 18 aa, synthetic construct
KTIIGGGSPHSKAHNQQT

SEQ ID NO: 3545 - protein, 18 aa, synthetic construct
KTINGNGSPHSKAQNPLT

SEQ ID NO: 3546 - protein, 18 aa, synthetic construct
KSIKGNGSPHSKAQNQQT

SEQ ID NO: 3547 - protein, 18 aa, synthetic construct
KTINGGGSPHSKAQSQQI

SEQ ID NO: 3548 - protein, 18 aa, synthetic construct
KTINGSVSPHGKAQNQLT

SEQ ID NO: 3549 - protein, 18 aa, synthetic construct
KTINGIGSPHSKAQNLGT

SEQ ID NO: 3550 - protein, 18 aa, synthetic construct
KTVNGNGSPHSKAQNHQT

SEQ ID NO: 3551 - protein, 18 aa, synthetic construct
KTSNGGGSPHSKAQNLQT

SEQ ID NO: 3552 - protein, 18 aa, synthetic construct
KTINGGGSPHSKSQNQHT

SEQ ID NO: 3553 - protein, 18 aa, synthetic construct
KTVNGGGSPHSKAQSQQT

SEQ ID NO: 3554 - protein, 18 aa, synthetic construct
KTIPIDGSPHSKAQNQQT

SEQ ID NO: 3555 - protein, 18 aa, synthetic construct
KTINGGGSPHSKAQNPPT

SEQ ID NO: 3556 - protein, 18 aa, synthetic construct
KTINGLGSPHSKSQNQQT

SEQ ID NO: 3557 - protein, 18 aa, synthetic construct
KTINGTGSPHSKAQNQQM

SEQ ID NO: 3558 - protein, 18 aa, synthetic construct
KTIRDAGSPHSKAQNQQT

SEQ ID NO: 3559 - protein, 18 aa, synthetic construct
KTVNGGGSPHSKAQNQQS

SEQ ID NO: 3560 - protein, 18 aa, synthetic construct
KTIQDGGSPHSKAQNQQT

SEQ ID NO: 3561 - protein, 18 aa, synthetic construct
KTISGGGSPHSKAQNQQN

SEQ ID NO: 3562 - protein, 18 aa, synthetic construct
KTINGGGSPHSKAQDKQT

SEQ ID NO: 3563 - protein, 18 aa, synthetic construct
KTIIGGGSPHSKAQNPQT

SEQ ID NO: 3564 - protein, 18 aa, synthetic construct
KTINGTGSPHSKAPNQLT

SEQ ID NO: 3565 - protein, 18 aa, synthetic construct
KTFNGGGSPHSKAQYQQT

SEQ ID NO: 3566 - protein, 18 aa, synthetic construct
KTVNGGGSPHSKAQHQQT

SEQ ID NO: 3567 - protein, 18 aa, synthetic construct
KTIPMEGSPHSKAQNQQT

SEQ ID NO: 3568 - protein, 18 aa, synthetic construct
KTVNGGGSPHSKSQNQQT

SEQ ID NO: 3569 - protein, 18 aa, synthetic construct
KTINGGGSPHSKAQNQMT

SEQ ID NO: 3570 - protein, 18 aa, synthetic construct
KTIRENGSPHSKAQNQQT

SEQ ID NO: 3571 - protein, 18 aa, synthetic construct
KTINGSASPHSKAHSQQT

SEQ ID NO: 3572 - protein, 18 aa, synthetic construct
KTNNGGGSPHSKAQNLQT

SEQ ID NO: 3573 - protein, 18 aa, synthetic construct
KSINGGGSPHSKAQYQQT

SEQ ID NO: 3574 - protein, 18 aa, synthetic construct
KTVNGNGSPHSKSQNQQT

SEQ ID NO: 3575 - protein, 18 aa, synthetic construct
KTLNGNGSPHSKAQNLQT

SEQ ID NO: 3576 - protein, 18 aa, synthetic construct
KTINGSGSSHSKAQNQQT

SEQ ID NO: 3577 - protein, 18 aa, synthetic construct
KTVNGGGSPHSKAQNHQT

SEQ ID NO: 3578 - protein, 18 aa, synthetic construct
KTINGGGSPHSKAQYQHT

SEQ ID NO: 3579 - protein, 18 aa, synthetic construct
KTIPKNGSPHSKAQNQQT

SEQ ID NO: 3580 - protein, 18 aa, synthetic construct
KTINKEGSPHSKAQNQQT

SEQ ID NO: 3581 - protein, 18 aa, synthetic construct
KTVNGGGSPHSKAQNLQT

SEQ ID NO: 3582 - protein, 18 aa, synthetic construct
KTIPAIGSPHSKAQNQQT

SEQ ID NO: 3583 - protein, 18 aa, synthetic construct
KTINGGGSPHSKAQNPQA

SEQ ID NO: 3584 - protein, 18 aa, synthetic construct
KTINGNGSPHSKSQNQHT

SEQ ID NO: 3585 - protein, 18 aa, synthetic construct
KTINGGGSPHSKSQNRQT

SEQ ID NO: 3586 - protein, 18 aa, synthetic construct
KTINGGGSPHSKAQRQQT

SEQ ID NO: 3587 - protein, 18 aa, synthetic construct
KTIIKNGSPHSKAQNQQT

SEQ ID NO: 3588 - protein, 18 aa, synthetic construct
KTINGSGSPHSYHVNQQT

SEQ ID NO: 3589 - protein, 18 aa, synthetic construct
KTERVSGSPHSKAQNQQT

SEQ ID NO: 3590 - skipped

SEQ ID NO: 3591 - protein, 18 aa, synthetic construct
KTFNRSGSPHSKAQNQQI

SEQ ID NO: 3592 - protein, 18 aa, synthetic construct
KTINGSGSPHTKAQNPPT

SEQ ID NO: 3593 - protein, 18 aa, synthetic construct
KSLNGSGSPHTKAQNQQT

SEQ ID NO: 3594 - protein, 18 aa, synthetic construct
KTENKSGSPHSKAQNQQT

SEQ ID NO: 3595 - protein, 18 aa, synthetic construct
KTDKGSGSPHSKAQNQQT

SEQ ID NO: 3596 - protein, 18 aa, synthetic construct
KTSNASGSPHSKAQHQQT

SEQ ID NO: 3597 - protein, 18 aa, synthetic construct
KTINASGSPHSKAINQQT

SEQ ID NO: 3598 - protein, 18 aa, synthetic construct
KTINGSGSPHSKAPNQQH

SEQ ID NO: 3599 - protein, 18 aa, synthetic construct
KTVNASGSPHSKAQNHQT

SEQ ID NO: 3600 - protein, 18 aa, synthetic construct
KTIDGSGSPHSKAENRQT

SEQ ID NO: 3601 - protein, 18 aa, synthetic construct
KTIKGSGSPHSKVQDQQT

SEQ ID NO: 3602 - protein, 18 aa, synthetic construct
KAINGSGSPHSKAQTQQA

SEQ ID NO: 3603 - protein, 18 aa, synthetic construct
KTEAKSGSPHSKAQNQQT

SEQ ID NO: 3604 - protein, 18 aa, synthetic construct
KTIPGSGSPHSKAQNLQT

SEQ ID NO: 3605 - protein, 18 aa, synthetic construct
KTIHGSGSPHSKAQNQAT

SEQ ID NO: 3606 - protein, 18 aa, synthetic construct
KAINGHDSPHKSGQIRQT

SEQ ID NO: 3607 - protein, 18 aa, synthetic construct
KTINGHDSPHKIGQNQHA

SEQ ID NO: 3608 - protein, 18 aa, synthetic construct
KAINGYDSPHKSGQKQQT

SEQ ID NO: 3609 - protein, 18 aa, synthetic construct
KTESGHDSPHKSGQNQQT

SEQ ID NO: 3610 - protein, 18 aa, synthetic construct
KTINGHDSPHKSGQSVQT

SEQ ID NO: 3611 - protein, 18 aa, synthetic construct
TTINGHDSPHKSGQNQQT

SEQ ID NO: 3612 - protein, 18 aa, synthetic construct
KTINGHESPHKSGRSQQT

SEQ ID NO: 3613 - protein, 18 aa, synthetic construct
KTINGHDSPHKSGQNKLE

SEQ ID NO: 3614 - protein, 18 aa, synthetic construct
KTINGHDSPHKTGQNQQK

SEQ ID NO: 3615 - protein, 18 aa, synthetic construct
KAINGHDNPHKSGQNQQT

SEQ ID NO: 3616 - protein, 18 aa, synthetic construct
KTINGQDSPHKSGQHQQA

SEQ ID NO: 3617 - protein, 18 aa, synthetic construct
KSINGHDSPHKSGQIQHT

SEQ ID NO: 3618 - protein, 18 aa, synthetic construct
KAINGHDSPHKSGPRQQT

SEQ ID NO: 3619 - protein, 18 aa, synthetic construct
KTVNGHDSPHKSGHTQQT

SEQ ID NO: 3620 - protein, 18 aa, synthetic construct
KSINGHDSPHKSGQRQHT

SEQ ID NO: 3621 - protein, 18 aa, synthetic construct
KAINGHDSPHKSAQSQQT

SEQ ID NO: 3622 - protein, 18 aa, synthetic construct
KSIYGHESPHKSGQNQQS

SEQ ID NO: 3623 - protein, 18 aa, synthetic construct
KTVNGHDSPHKSLQNQQT

SEQ ID NO: 3624 - protein, 18 aa, synthetic construct
KTSNGYDSPHKSGQKQQT

SEQ ID NO: 3625 - protein, 18 aa, synthetic construct
KTVNGHDSPHKSGRNQET

SEQ ID NO: 3626 - protein, 18 aa, synthetic construct
KTTNGHDSPHKSGQTQLT

SEQ ID NO: 3627 - protein, 18 aa, synthetic construct
KAINGHDSPHKSEKNQQT

SEQ ID NO: 3628 - protein, 18 aa, synthetic construct
KIINGRDSPHKSGQDQQT

SEQ ID NO: 3629 - protein, 18 aa, synthetic construct
KTISGHDSPHKTGHNQQT

SEQ ID NO: 3630 - protein, 18 aa, synthetic construct
KTVNAHDSPHKSGQNQLT

SEQ ID NO: 3631 - protein, 18 aa, synthetic construct
KSINGYDSPHKSGQTQQT

SEQ ID NO: 3632 - protein, 18 aa, synthetic construct
KTINGHESPHKSGQTQQI

SEQ ID NO: 3633 - protein, 18 aa, synthetic construct
KTINGHDSPHKSGQSKQA

SEQ ID NO: 3634 - protein, 18 aa, synthetic construct
KAIIGHESPHKSGQNQQT

SEQ ID NO: 3635 - protein, 18 aa, synthetic construct
KTINGHDSPHKTGQNQPP

SEQ ID NO: 3636 - protein, 18 aa, synthetic construct
KAINGHDSPHKSGQSPQT

SEQ ID NO: 3637 - protein, 18 aa, synthetic construct
KTIKGNDSPHKSVQNQQT

SEQ ID NO: 3638 - protein, 18 aa, synthetic construct
KTEFGHDSPHKSGQNQQT

SEQ ID NO: 3639 - protein, 18 aa, synthetic construct
KTINGHDSPHKSAQNYQT

SEQ ID NO: 3640 - protein, 18 aa, synthetic construct
KTINAHDSPHKIGQNHQT

SEQ ID NO: 3641 - protein, 18 aa, synthetic construct
KTINGHESPHKSAQNRQT

SEQ ID NO: 3642 - protein, 18 aa, synthetic construct
KTTNGHDSPHKSGQNQQG

SEQ ID NO: 3643 - protein, 18 aa, synthetic construct
KTIKGQDSPHKIGQNQQT

SEQ ID NO: 3644 - protein, 18 aa, synthetic construct
KTVNGHDSPHKSGQNHLT

SEQ ID NO: 3645 - protein, 18 aa, synthetic construct
KSINGHDSPHKSGQYQHT

SEQ ID NO: 3646 - protein, 18 aa, synthetic construct
KTINGNDSPHKSVQNHQT

SEQ ID NO: 3647 - protein, 18 aa, synthetic construct
KTITGHDSPHKSGQNQWT

SEQ ID NO: 3648 - protein, 18 aa, synthetic construct
KTNNGHDSPHKSVQNQHT

SEQ ID NO: 3649 - protein, 18 aa, synthetic construct
KTIDGHDSPHKSGQNQHA

SEQ ID NO: 3650 - protein, 18 aa, synthetic construct
KTVNGHDSPHKSGQTRQT

SEQ ID NO: 3651 - protein, 18 aa, synthetic construct
KTVNGHDSPHKSGQNLHT

SEQ ID NO: 3652 - protein, 18 aa, synthetic construct
KAISGHDSPHKSGLNQQT

SEQ ID NO: 3653 - protein, 18 aa, synthetic construct
KAINGHDSPHKSAQNQET

SEQ ID NO: 3654 - protein, 18 aa, synthetic construct
KTITGHDSPHKSGQHLQT

SEQ ID NO: 3655 - protein, 18 aa, synthetic construct
KTINGHDSPHKSRLNQPT

SEQ ID NO: 3656 - protein, 18 aa, synthetic construct
KTVDGHDSPHKSGQKQQT

SEQ ID NO: 3657 - protein, 18 aa, synthetic construct
KTINGQDSPHKSGQNQDT

SEQ ID NO: 3658 - protein, 18 aa, synthetic construct
KTIEGHDSPHKSGRNQQT

SEQ ID NO: 3659 - protein, 18 aa, synthetic construct
KTTNGHDSPHKSGQNLLT

SEQ ID NO: 3660 - protein, 18 aa, synthetic construct
KTINGHDSPHKSGQLVIT

SEQ ID NO: 3661 - protein, 18 aa, synthetic construct
KTVNGHDSPHKSRQSQQT

SEQ ID NO: 3662 - protein, 18 aa, synthetic construct
KTINGHDSPHKSGRTQET

SEQ ID NO: 3663 - protein, 18 aa, synthetic construct
KTINGHDSPHKSVQTHQT

SEQ ID NO: 3664 - protein, 18 aa, synthetic construct
KTSNGHDSPHKSGQNQPA

SEQ ID NO: 3665 - protein, 18 aa, synthetic construct
KTEGKHDSPHKSGQNQQT

SEQ ID NO: 3666 - protein, 18 aa, synthetic construct
KVINGHDSPHKSGQTQQT

SEQ ID NO: 3667 - protein, 18 aa, synthetic construct
KTINGPDSPHKIGQNQQS

SEQ ID NO: 3668 - protein, 18 aa, synthetic construct
KAVNGHDSPHKSVQNQQT

SEQ ID NO: 3669 - protein, 18 aa, synthetic construct
KTINGHDSPHKSRQDQHT

SEQ ID NO: 3670 - protein, 18 aa, synthetic construct
KAINGPDSPHKSGQKQQT

SEQ ID NO: 3671 - protein, 18 aa, synthetic construct
KTINGHDSPHKSRQSQHT

SEQ ID NO: 3672 - protein, 18 aa, synthetic construct
KTIYGHDSPHKSVQNQLT

SEQ ID NO: 3673 - protein, 18 aa, synthetic construct
KTVNGHDSPHKSGQNLLT

SEQ ID NO: 3674 - protein, 18 aa, synthetic construct
KTESAHDSPHKSGQNQQT

SEQ ID NO: 3675 - protein, 18 aa, synthetic construct
KTTNGQDSPHKSGQNQQS

SEQ ID NO: 3676 - protein, 18 aa, synthetic construct
KTIDGHDSPHKSGRNQQI

SEQ ID NO: 3677 - protein, 18 aa, synthetic construct
KTINGYDSPHKSGQYQHT

SEQ ID NO: 3678 - protein, 18 aa, synthetic construct
KTDNGHDSPHKSRQNQQT

SEQ ID NO: 3679 - protein, 18 aa, synthetic construct
KTINGHDSPHKSWVRQQT

SEQ ID NO: 3680 - protein, 18 aa, synthetic construct
KTINGHESPHKSGQNQHS

SEQ ID NO: 3681 - protein, 18 aa, synthetic construct
KTVNGHDSPHKIGHNQQT

SEQ ID NO: 3682 - protein, 18 aa, synthetic construct
KTCNGHDSPHKSGRNQQT

SEQ ID NO: 3683 - protein, 18 aa, synthetic construct
KNVVGHDSPHKSGQNQQT

SEQ ID NO: 3684 - protein, 18 aa, synthetic construct
KTELWHDSPHKSGQNQQT

SEQ ID NO: 3685 - protein, 18 aa, synthetic construct
KTELRHDSPHKSGQNQQT

SEQ ID NO: 3686 - protein, 18 aa, synthetic construct
KTINGHDSPHKSNAWQQT

SEQ ID NO: 3687 - protein, 18 aa, synthetic construct
KTDAGHDSPHKSGQNQQT

SEQ ID NO: 3688 - protein, 18 aa, synthetic construct
KTEVGHDSPHKSGQNQQT

SEQ ID NO: 3689 - protein, 18 aa, synthetic construct
KTESRHDSPHKSGQNQQT

SEQ ID NO: 3690 - protein, 18 aa, synthetic construct
KSELGHDSPHKSGQNQQT

SEQ ID NO: 3691 - protein, 18 aa, synthetic construct
KTINGHDSPHKSGQSVPT

SEQ ID NO: 3692 - protein, 18 aa, synthetic construct
KTINGHESPHKSGQNIQP

SEQ ID NO: 3693 - protein, 18 aa, synthetic construct
KTEMKHDSPHKSGQNQQT

SEQ ID NO: 3694 - protein, 18 aa, synthetic construct
KTINGHDSPHKSVQNHLN

SEQ ID NO: 3695 - protein, 18 aa, synthetic construct
KTINGHDSPHKIGLDQQT

SEQ ID NO: 3696 - protein, 18 aa, synthetic construct
KTINGHDSPHKRGPDQQS

SEQ ID NO: 3697 - protein, 18 aa, synthetic construct
KTIKGHDSPHKSGESQQT

SEQ ID NO: 3698 - protein, 18 aa, synthetic construct
KTEGWHDSPHKSGQNQQT

SEQ ID NO: 3699 - protein, 18 aa, synthetic construct
KTINGHDSPHKHGQNHQT

SEQ ID NO: 3700 - protein, 18 aa, synthetic construct
KTEQLHDSPHKSGQNQQT

SEQ ID NO: 3701 - protein, 18 aa, synthetic construct
KTIIGHDSPHKSGQYQHT

SEQ ID NO: 3702 - protein, 18 aa, synthetic construct
KTSNGHDSPHKSVQNKQT

SEQ ID NO: 3703 - protein, 18 aa, synthetic construct
KIVNGQVSPHKSGQNQQT

SEQ ID NO: 3704 - protein, 18 aa, synthetic construct
KTVNGHDSPHKSGQRQLT

SEQ ID NO: 3705 - protein, 18 aa, synthetic construct
KTVNGHDSPHKIGQNQLT

SEQ ID NO: 3706 - protein, 18 aa, synthetic construct
KTINGHDSPHKSGQIIVT

SEQ ID NO: 3707 - protein, 18 aa, synthetic construct
KTEKIHDSPHKSGQNQQT

SEQ ID NO: 3708 - protein, 18 aa, synthetic construct
KTENAHDSPHKSGQNQQT

SEQ ID NO: 3709 - protein, 18 aa, synthetic construct
KIGNGHESPHKSGQNQQT

SEQ ID NO: 3710 - protein, 18 aa, synthetic construct
KEVMGHDSPHKSGQNQQT

SEQ ID NO: 3711 - protein, 18 aa, synthetic construct
KTEVKHDSPHKSGQNQQT

SEQ ID NO: 3712 - protein, 18 aa, synthetic construct
KTINGYDSPHKSGQKQST

SEQ ID NO: 3713 - protein, 18 aa, synthetic construct
KYQVGHDSPHKSGQNQQT

SEQ ID NO: 3714 - protein, 18 aa, synthetic construct
KTEAMHDSPHKSGQNQQT

SEQ ID NO: 3715 - protein, 18 aa, synthetic construct
KTIKGDDSPHKSVQNQQT

SEQ ID NO: 3716 - protein, 18 aa, synthetic construct
KTINGHDSPHKSVQSHQT

SEQ ID NO: 3717 - protein, 18 aa, synthetic construct
KTINGHDSPHKSGQFVVT

SEQ ID NO: 3718 - protein, 18 aa, synthetic construct
KTVNGHDSPHKSRQNLQT

SEQ ID NO: 3719 - protein, 18 aa, synthetic construct
KATNGHNSPHKSGQNQET

SEQ ID NO: 3720 - protein, 18 aa, synthetic construct
KAINGHDSPHKSAQNQQI

SEQ ID NO: 3721 - protein, 18 aa, synthetic construct
KTEHGHDSPHKSGQNQQT

SEQ ID NO: 3722 - protein, 18 aa, synthetic construct
KTVENHDSPHKSGQNQQT

SEQ ID NO: 3723 - protein, 18 aa, synthetic construct
KTIYGHDSPHKSGQSQPT

SEQ ID NO: 3724 - protein, 18 aa, synthetic construct
KTISGHESPHKSGQNEQT

SEQ ID NO: 3725 - protein, 18 aa, synthetic construct
KAIIGHDSPHKSAQNQQT

SEQ ID NO: 3726 - protein, 18 aa, synthetic construct
KAIDGHDSPHKSGQNQLT

SEQ ID NO: 3727 - protein, 18 aa, synthetic construct
KTIMGHDSPHKSVQNQQT

SEQ ID NO: 3728 - protein, 18 aa, synthetic construct
KEVGGHDSPHKSGQNQQT

SEQ ID NO: 3729 - protein, 18 aa, synthetic construct
KTINGHDSPHKSAQNLLT

SEQ ID NO: 3730 - protein, 18 aa, synthetic construct
KTEFTHDSPHKSGQNQQT

SEQ ID NO: 3731 - protein, 18 aa, synthetic construct
KSEMGHDSPHKSGQNQQT

SEQ ID NO: 3732 - protein, 18 aa, synthetic construct
KAQQGHDSPHKSGQNQQT

SEQ ID NO: 3733 - protein, 18 aa, synthetic construct
KTEVMHDSPHKSGQNQQT

SEQ ID NO: 3734 - protein, 18 aa, synthetic construct
KAINGHDSPHKSGQSLQT

SEQ ID NO: 3735 - protein, 18 aa, synthetic construct
KCGEGHDSPHKSGQNQQT

SEQ ID NO: 3736 - protein, 18 aa, synthetic construct
KTVNGHDSPHKSAQNHQT

SEQ ID NO: 3737 - protein, 18 aa, synthetic construct
KTVNGHDSPHKSGQTQLT

SEQ ID NO: 3738 - protein, 18 aa, synthetic construct
KTNNGHDSPHKSGRNRQT

SEQ ID NO: 3739 - protein, 18 aa, synthetic construct
KTCNEHDSPHKSGQNQQT

SEQ ID NO: 3740 - protein, 18 aa, synthetic construct
KTINGHDSPHKYGQNEQT

SEQ ID NO: 3741 - protein, 18 aa, synthetic construct
KASNRHDSPHKSGHNQQT

SEQ ID NO: 3742 - protein, 18 aa, synthetic construct
KTETKHDSPHKSGQNQQT

SEQ ID NO: 3743 - protein, 18 aa, synthetic construct
KSINGHDSPHKSQQNQQT

SEQ ID NO: 3744 - protein, 18 aa, synthetic construct
KTIGGHDSPHKSGQNQQI

SEQ ID NO: 3745 - protein, 18 aa, synthetic construct
KTDPQHDSPHKSGQNQQT

SEQ ID NO: 3746 - protein, 18 aa, synthetic construct
KTINRHDSPHKIVQNQQT

SEQ ID NO: 3747 - protein, 18 aa, synthetic construct
KTEQYHDSPHKSGQNQQT

SEQ ID NO: 3748 - protein, 18 aa, synthetic construct
KTINGHDSPHKSVQSKQT

SEQ ID NO: 3749 - protein, 18 aa, synthetic construct
KELVGHDSPHKSGQNQQT

SEQ ID NO: 3750 - protein, 18 aa, synthetic construct
KTENRHDSPHKSGQNQQT

SEQ ID NO: 3751 - protein, 18 aa, synthetic construct
KELMGHDSPHKSGQNQQT

SEQ ID NO: 3752 - protein, 18 aa, synthetic construct
KTINGNDSPHKIGHNQQT

SEQ ID NO: 3753 - protein, 18 aa, synthetic construct
KTEGHHDSPHKSGQNQQT

SEQ ID NO: 3754 - protein, 18 aa, synthetic construct
KTEGYHDSPHKSGQNQQT

SEQ ID NO: 3755 - protein, 18 aa, synthetic construct
KTVNGHDSPHKSGQTQQI

SEQ ID NO: 3756 - protein, 18 aa, synthetic construct
KTINGQDSPHKSGQNPLT

SEQ ID NO: 3757 - protein, 18 aa, synthetic construct
KTINGHDSPHKSGRDQKT

SEQ ID NO: 3758 - protein, 18 aa, synthetic construct
KTINGHDSPHKSVHNQQN

SEQ ID NO: 3759 - protein, 18 aa, synthetic construct
KTINGHDSPHKSGQWKRT

SEQ ID NO: 3760 - protein, 18 aa, synthetic construct
KNEIGHDSPHKSGQNQQT

SEQ ID NO: 3761 - protein, 18 aa, synthetic construct
KAINGHDSPHKSGQSQQI

SEQ ID NO: 3762 - protein, 18 aa, synthetic construct
KIINGHDSPHKSRQAQQT

SEQ ID NO: 3763 - protein, 18 aa, synthetic construct
KTPNGHDSPHKSGQNQQI

SEQ ID NO: 3764 - protein, 18 aa, synthetic construct
KITNGHDSPHKSGQTQQT

SEQ ID NO: 3765 - protein, 18 aa, synthetic construct
KTINGHDSPHKSVQNHQI

SEQ ID NO: 3766 - protein, 18 aa, synthetic construct
KTINGHDSPHKSKQNQQA

SEQ ID NO: 3767 - protein, 18 aa, synthetic construct
KTINGHDSPHKSAQNQLN

SEQ ID NO: 3768 - protein, 18 aa, synthetic construct
KTDITHDSPHKSGQNQQT

SEQ ID NO: 3769 - protein, 18 aa, synthetic construct
KTVNGHDSPHKSGQTQPT

SEQ ID NO: 3770 - protein, 18 aa, synthetic construct
KTEKFHDSPHKSGQNQQT

SEQ ID NO: 3771 - protein, 18 aa, synthetic construct
KTDQGHDSPHKSGQNQQT

SEQ ID NO: 3772 - protein, 18 aa, synthetic construct
KTINGHDSPHKLWINQQT

SEQ ID NO: 3773 - protein, 18 aa, synthetic construct
KGINGPDSPHKSGQNQQT

SEQ ID NO: 3774 - protein, 18 aa, synthetic construct
KSEIGHDSPHKSGQNQQT

SEQ ID NO: 3775 - protein, 18 aa, synthetic construct
KTINGHDSPHKSVQKQLT

SEQ ID NO: 3776 - protein, 18 aa, synthetic construct
KTVNGHDSPHKSGRNQLA

SEQ ID NO: 3777 - protein, 18 aa, synthetic construct
KTNNVHDSPHKSGQNQQS

SEQ ID NO: 3778 - protein, 18 aa, synthetic construct
KSEKGHDSPHKSGQNQQT

SEQ ID NO: 3779 - protein, 18 aa, synthetic construct
KWSAGHDSPHKSGQNQQT

SEQ ID NO: 3780 - protein, 18 aa, synthetic construct
KELAGHDSPHKSGQNQQT

SEQ ID NO: 3781 - protein, 18 aa, synthetic construct
KTINGHDSPHKMGRNQQS

SEQ ID NO: 3782 - protein, 18 aa, synthetic construct
KTDQAHDSPHKSGQNQQT

SEQ ID NO: 3783 - protein, 18 aa, synthetic construct
KTETQHDSPHKSGQNQQT

SEQ ID NO: 3784 - protein, 18 aa, synthetic construct
KTEMTHDSPHKSGQNQQT

SEQ ID NO: 3785 - protein, 18 aa, synthetic construct
KTINGHDSPHKSGISIQT

SEQ ID NO: 3786 - protein, 18 aa, synthetic construct
KTDAVHDSPHKSGQNQQT

SEQ ID NO: 3787 - protein, 18 aa, synthetic construct
KTSNGHDSPHKSVQNLQT

SEQ ID NO: 3788 - protein, 18 aa, synthetic construct
KTEKYHDSPHKSGQNQQT

SEQ ID NO: 3789 - protein, 18 aa, synthetic construct
KQTQGHDSPHKSGQNQQT

SEQ ID NO: 3790 - protein, 18 aa, synthetic construct
KTINGHDSPHKMAHNQQT

SEQ ID NO: 3791 - protein, 18 aa, synthetic construct
KTINGHDSPHKHGQNQQN

SEQ ID NO: 3792 - protein, 18 aa, synthetic construct
KGADGHDSPHKSGQNQQT

SEQ ID NO: 3793 - protein, 18 aa, synthetic construct
KVGEGHDSPHKSGQNQQT

SEQ ID NO: 3794 - protein, 18 aa, synthetic construct
KANEGHDSPHKSGQNQQT

SEQ ID NO: 3795 - protein, 18 aa, synthetic construct
KTDTMHDSPHKSGQNQQT

SEQ ID NO: 3796 - protein, 18 aa, synthetic construct
KTINGHDSPHKSVQSQQS

SEQ ID NO: 3797 - protein, 18 aa, synthetic construct
KTCIAHDSPHKSGQNQQT

SEQ ID NO: 3798 - protein, 18 aa, synthetic construct
KTINGHDSPHKSGQTVCT

SEQ ID NO: 3799 - protein, 18 aa, synthetic construct
KELRGHDSPHKSGQNQQT

SEQ ID NO: 3800 - protein, 18 aa, synthetic construct
KCQIGHDSPHKSGQNQQT

SEQ ID NO: 3801 - protein, 18 aa, synthetic construct
KGVMGHDSPHKSGQNQQT

SEQ ID NO: 3802 - protein, 18 aa, synthetic construct
KACDGHDSPHKSGQNQQT

SEQ ID NO: 3803 - protein, 18 aa, synthetic construct
KTINGQDSPHKSGQYQQI

SEQ ID NO: 3804 - protein, 18 aa, synthetic construct
KTINGHDSPHKSGQQIMT

SEQ ID NO: 3805 - protein, 18 aa, synthetic construct
KTINGHDSPHKSRQNEQS

SEQ ID NO: 3806 - protein, 18 aa, synthetic construct
KASNGHDSPHKSGLNHQT

SEQ ID NO: 3807 - protein, 18 aa, synthetic construct
KTVNGHDSPHKSGQSQPT

SEQ ID NO: 3808 - protein, 18 aa, synthetic construct
KNELGHDSPHKSGQNQQT

SEQ ID NO: 3809 - protein, 18 aa, synthetic construct
KTETFHDSPHKSGQNQQT

SEQ ID NO: 3810 - protein, 18 aa, synthetic construct
KAAEGHDSPHKSGQNQQT

SEQ ID NO: 3811 - protein, 18 aa, synthetic construct
KGQNGHDSPHKSGQNQQT

SEQ ID NO: 3812 - protein, 18 aa, synthetic construct
KNEFGHDSPHKSGQNQQT

SEQ ID NO: 3813 - protein, 18 aa, synthetic construct
KTSIGYDSPHKSGQNQQT

SEQ ID NO: 3814 - protein, 18 aa, synthetic construct
KTDNGHDSPHKSGQNLQT

SEQ ID NO: 3815 - protein, 18 aa, synthetic construct
KTEGQHDSPHKSGQNQQT

SEQ ID NO: 3816 - protein, 18 aa, synthetic construct
KTITGHDSPHKSRQDQQT

SEQ ID NO: 3817 - protein, 18 aa, synthetic construct
KAEHGHDSPHKSGQNQQT

SEQ ID NO: 3818 - protein, 18 aa, synthetic construct
KTINGDDSPHKSGQKQLT

SEQ ID NO: 3819 - protein, 18 aa, synthetic construct
KCDQGHDSPHKSGQNQQT

SEQ ID NO: 3820 - protein, 18 aa, synthetic construct
KEILGHDSPHKSGQNQQT

SEQ ID NO: 3821 - protein, 18 aa, synthetic construct
KTERNHDSPHKSGQNQQT

SEQ ID NO: 3822 - protein, 18 aa, synthetic construct
KAINGDDSPHKSGHNQQT

SEQ ID NO: 3823 - protein, 18 aa, synthetic construct
KTSNGHNSPHKSGQNQET

SEQ ID NO: 3824 - protein, 18 aa, synthetic construct
KTINGHDSPHKSGQMIHT

SEQ ID NO: 3825 - protein, 18 aa, synthetic construct
KNAIGHDSPHKSGQNQQT

SEQ ID NO: 3826 - protein, 18 aa, synthetic construct
KTDKFHDSPHKSGQNQQT

SEQ ID NO: 3827 - protein, 18 aa, synthetic construct
KTEGFHDSPHKSGQNQQT

SEQ ID NO: 3828 - protein, 18 aa, synthetic construct
KVINGHDSPHKSGRNHQS

SEQ ID NO: 3829 - protein, 18 aa, synthetic construct
KTITGHDSPHKSVQNRQT

SEQ ID NO: 3830 - protein, 18 aa, synthetic construct
KTPDMHDSPHKSGQNQQT

SEQ ID NO: 3831 - protein, 18 aa, synthetic construct
KTINGHDSPHKSGQKMNT

SEQ ID NO: 3832 - protein, 18 aa, synthetic construct
KTELQHDSPHKSGQNQQT

SEQ ID NO: 3833 - protein, 18 aa, synthetic construct
KTIHGHDSPHKSGQSQQN

SEQ ID NO: 3834 - protein, 18 aa, synthetic construct
KTEIGHDSPHKSGQNQQT

SEQ ID NO: 3835 - protein, 18 aa, synthetic construct
KTINGHDSPHKSGQYQHA

SEQ ID NO: 3836 - protein, 18 aa, synthetic construct
KTELYHDSPHKSGQNQQT

SEQ ID NO: 3837 - protein, 18 aa, synthetic construct
KTINGRGSPHKRGQNQQT

SEQ ID NO: 3838 - protein, 18 aa, synthetic construct
KTINGHGSPHSKAQNPQT

SEQ ID NO: 3839 - protein, 18 aa, synthetic construct
KTFNGSASPHSKALNQQT

SEQ ID NO: 3840 - protein, 18 aa, synthetic construct
KTINGCGSPHASGQNQQT

SEQ ID NO: 3841 - protein, 18 aa, synthetic construct
KTINGNGSPHSKAQNHQA

SEQ ID NO: 3842 - protein, 18 aa, synthetic construct
KTINGMGSPHSKTQNQQT

SEQ ID NO: 3843 - protein, 18 aa, synthetic construct
KTVNGTGSPHSKAQNQLT

SEQ ID NO: 3844 - protein, 18 aa, synthetic construct
KTIHGNGSPHSKAQNQET

SEQ ID NO: 3845 - protein, 18 aa, synthetic construct
KAINGNGSPHKRGQNQQT

SEQ ID NO: 3846 - protein, 18 aa, synthetic construct
KTINGNGSPHSKAPNLQT

SEQ ID NO: 3847 - protein, 18 aa, synthetic construct
KTIKGGGSPHSKAQDQQT

SEQ ID NO: 3848 - protein, 18 aa, synthetic construct
KTINGHPSPHWKGQNQQT

SEQ ID NO: 3849 - protein, 18 aa, synthetic construct
KTINGSGSPHIVWQNQQT

SEQ ID NO: 3850 - protein, 18 aa, synthetic construct
KTINGSGSPHSKYFMQQT

SEQ ID NO: 3851 - protein, 18 aa, synthetic construct
KTINGSGSPHSKARQRQT

SEQ ID NO: 3852 - protein, 18 aa, synthetic construct
KTINGSGSPHSCHQNQQT

SEQ ID NO: 3853 - protein, 18 aa, synthetic construct
KTINGSGSPHFPWQNQQT

SEQ ID NO: 3854 - protein, 18 aa, synthetic construct
KTINGSGSPHSKIRRQQT

SEQ ID NO: 3855 - protein, 18 aa, synthetic construct
KTINGSGSPHVYYQNQQT

SEQ ID NO: 3856 - protein, 18 aa, synthetic construct
KTINGSGSPHSLYWNQQT

SEQ ID NO: 3857 - protein, 18 aa, synthetic construct
KTINGSGSPHSKPKRQQT

SEQ ID NO: 3858 - protein, 18 aa, synthetic construct
KPRWGSGSPHSKAQNQQT

SEQ ID NO: 3859 - protein, 18 aa, synthetic construct
KTINGSGSPHSKAFSWQT

SEQ ID NO: 3860 - protein, 18 aa, synthetic construct
KTINGSGSPHSRFWNQQT

SEQ ID NO: 3861 - protein, 18 aa, synthetic construct
KTINGSGSPHSKAQCLKT

SEQ ID NO: 3862 - protein, 18 aa, synthetic construct
KTINGSGSPHSRMRNQQT

SEQ ID NO: 3863 - protein, 18 aa, synthetic construct
KTINGSGSPHSVKKNQQT

SEQ ID NO: 3864 - protein, 18 aa, synthetic construct
KTINGSGSPHSWAPNQQT

SEQ ID NO: 3865 - protein, 18 aa, synthetic construct
KTINGSGSPHSLWKNQQT

SEQ ID NO: 3866 - protein, 18 aa, synthetic construct
KTINGSGSPHSKARWQQT

SEQ ID NO: 3867 - protein, 18 aa, synthetic construct
KTINGSGSPHSFRPNQQT

SEQ ID NO: 3868 - protein, 18 aa, synthetic construct
KTINGSGSPHSKKVFQQT

SEQ ID NO: 3869 - protein, 18 aa, synthetic construct
KTINGSGSPHSYAFNQQT

SEQ ID NO: 3870 - protein, 18 aa, synthetic construct
KTINGSGSPHSKACSRQT

SEQ ID NO: 3871 - protein, 18 aa, synthetic construct
KYSAGSGSPHSKAQNQQT

SEQ ID NO: 3872 - protein, 18 aa, synthetic construct
KTINGSGSPHSKRLWQQT

SEQ ID NO: 3873 - protein, 18 aa, synthetic construct
KTINGSGSPHSCSRNQQT

SEQ ID NO: 3874 - protein, 18 aa, synthetic construct
KTINGSGSPHSRCPNQQT

SEQ ID NO: 3875 - protein, 18 aa, synthetic construct
KTINGSGSPHSGACNQQT

SEQ ID NO: 3876 - protein, 18 aa, synthetic construct
KYYTGSGSPHSKAQNQQT

SEQ ID NO: 3877 - protein, 18 aa, synthetic construct
KTINGSGSPHSKFRQQQT

SEQ ID NO: 3878 - protein, 18 aa, synthetic construct
KTINGSGSPHSFPFNQQT

SEQ ID NO: 3879 - protein, 18 aa, synthetic construct
KTINGSGSPHSFFGNQQT

SEQ ID NO: 3880 - protein, 18 aa, synthetic construct
KTINGSGSPHSMCQNQQT

SEQ ID NO: 3881 - protein, 18 aa, synthetic construct
KTINGSGSPHSKLFWQQT

SEQ ID NO: 3882 - protein, 18 aa, synthetic construct
KTINGSGSPHSKTRKQQT

SEQ ID NO: 3883 - protein, 18 aa, synthetic construct
KTINGSGSPHSGKRNQQT

SEQ ID NO: 3884 - protein, 18 aa, synthetic construct
KTINGSGSPHSKAQNFKR

SEQ ID NO: 3885 - protein, 18 aa, synthetic construct
KTINGSGSPHFYRQNQQT

SEQ ID NO: 3886 - protein, 18 aa, synthetic construct
KTINGSGSPHCRVQNQQT

SEQ ID NO: 3887 - protein, 18 aa, synthetic construct
KTINGSGSPHYGIQNQQT

SEQ ID NO: 3888 - protein, 18 aa, synthetic construct
KTINGSGSPHSKAQRFKT

SEQ ID NO: 3889 - protein, 18 aa, synthetic construct
KTINGSGSPHVNCQNQQT

SEQ ID NO: 3890 - protein, 18 aa, synthetic construct
KTINGSGSPHSKPFRQQT

SEQ ID NO: 3891 - protein, 18 aa, synthetic construct
KTINGSGSPHSLAWNQQT

SEQ ID NO: 3892 - protein, 18 aa, synthetic construct
KTINGSGSPHSKRSYQQT

SEQ ID NO: 3893 - protein, 18 aa, synthetic construct
KTINGSGSPHWSYQNQQT

SEQ ID NO: 3894 - protein, 18 aa, synthetic construct
KTINGSGSPHRWLQNQQT

SEQ ID NO: 3895 - protein, 18 aa, synthetic construct
KTINGSGSPHPSCQNQQT

SEQ ID NO: 3896 - protein, 18 aa, synthetic construct
KTINGSGSPHSSWLNQQT

SEQ ID NO: 3897 - protein, 18 aa, synthetic construct
KPRFGSGSPHSKAQNQQT

SEQ ID NO: 3898 - protein, 18 aa, synthetic construct
KWLTGSGSPHSKAQNQQT

SEQ ID NO: 3899 - protein, 18 aa, synthetic construct
KTINGSGSPHSKRRAQQT

SEQ ID NO: 3900 - protein, 18 aa, synthetic construct
KTINGSGSPHSKAQTCRT

SEQ ID NO: 3901 - protein, 18 aa, synthetic construct
KTINGSGSPHSKGCTQQT

SEQ ID NO: 3902 - protein, 18 aa, synthetic construct
KTINGSGSPHVPWQNQQT

SEQ ID NO: 3903 - protein, 18 aa, synthetic construct
KTINGSGSPHSKRYTQQT

SEQ ID NO: 3904 - protein, 18 aa, synthetic construct
KTINGSGSPHSGCQNQQT

SEQ ID NO: 3905 - protein, 18 aa, synthetic construct
KTINGSGSPHSFTPNQQT

SEQ ID NO: 3906 - protein, 18 aa, synthetic construct
KTINGSGSPHSTTCNQQT

SEQ ID NO: 3907 - protein, 18 aa, synthetic construct
KTINGSGSPHSKARMYQT

SEQ ID NO: 3908 - protein, 18 aa, synthetic construct
KTINGSGSPHPKRQNQQT

SEQ ID NO: 3909 - protein, 18 aa, synthetic construct
KTINGSGSPHSKCFLQQT

SEQ ID NO: 3910 - protein, 18 aa, synthetic construct
KTINGSGSPHWVPQNQQT

SEQ ID NO: 3911 - protein, 18 aa, synthetic construct
KTINGSGSPHSFWSNQQT

SEQ ID NO: 3912 - protein, 18 aa, synthetic construct
KRSYGSGSPHSKAQNQQT

SEQ ID NO: 3913 - protein, 18 aa, synthetic construct
KYVFGSGSPHSKAQNQQT

SEQ ID NO: 3914 - protein, 18 aa, synthetic construct
KTINGSGSPHSKFKNQQT

SEQ ID NO: 3915 - protein, 18 aa, synthetic construct
KTINGSGSPHRIKQNQQT

SEQ ID NO: 3916 - protein, 18 aa, synthetic construct
KTINGSGSPHSKAPRRQT

SEQ ID NO: 3917 - protein, 18 aa, synthetic construct
KTINGSGSPHSFRYNQQT

SEQ ID NO: 3918 - protein, 18 aa, synthetic construct
KTINGSGSPHSKMICQQT

SEQ ID NO: 3919 - protein, 18 aa, synthetic construct
KTINGSGSPHLRWQNQQT

SEQ ID NO: 3920 - protein, 18 aa, synthetic construct
KTINGSGSPHLPTQNQQT

SEQ ID NO: 3921 - protein, 18 aa, synthetic construct
KTINGSGSPHSKWKSQQT

SEQ ID NO: 3922 - protein, 18 aa, synthetic construct
KTINGSGSPHSYMRNQQT

SEQ ID NO: 3923 - protein, 18 aa, synthetic construct
KTINGSGSPHSKAARRQT

SEQ ID NO: 3924 - protein, 18 aa, synthetic construct
KTINGSGSPHLLCQNQQT

SEQ ID NO: 3925 - protein, 18 aa, synthetic construct
KTINGSGSPHRCCQNQQT

SEQ ID NO: 3926 - protein, 18 aa, synthetic construct
KTINGSGSPHLCVQNQQT

SEQ ID NO: 3927 - protein, 18 aa, synthetic construct
KTINGSGSPHSKLTRQQT

SEQ ID NO: 3928 - protein, 18 aa, synthetic construct
KTINGSGSPHSKLCTQQT

SEQ ID NO: 3929 - protein, 18 aa, synthetic construct
KKHLGSGSPHSKAQNQQT

SEQ ID NO: 3930 - protein, 18 aa, synthetic construct
KTINGSGSPHSKIRGQQT

SEQ ID NO: 3931 - protein, 18 aa, synthetic construct
KTINGSGSPHSYLVNQQT

SEQ ID NO: 3932 - protein, 18 aa, synthetic construct
KTINGSGSPHQGCQNQQT

SEQ ID NO: 3933 - protein, 18 aa, synthetic construct
KTINGSGSPHMAFQNQQT

SEQ ID NO: 3934 - protein, 18 aa, synthetic construct
KTINGSGSPHSKACQFQT

SEQ ID NO: 3935 - protein, 18 aa, synthetic construct
KTINGSGSPHSKWGLQQT

SEQ ID NO: 3936 - protein, 18 aa, synthetic construct
KTINGSGSPHSKILRQQT

SEQ ID NO: 3937 - protein, 18 aa, synthetic construct
KTINGSGSPHSFQINQQT

SEQ ID NO: 3938 - protein, 18 aa, synthetic construct
KTINGSGSPHSKACISQT

SEQ ID NO: 3939 - protein, 18 aa, synthetic construct
KTINGSGSPHSKAQTHRT

SEQ ID NO: 3940 - protein, 18 aa, synthetic construct
KTINGSGSPHSKALRCQT

SEQ ID NO: 3941 - protein, 18 aa, synthetic construct
KTINGSGSPHSKAFYIQT

SEQ ID NO: 3942 - protein, 18 aa, synthetic construct
KTINGSGSPHSKAHARQT

SEQ ID NO: 3943 - protein, 18 aa, synthetic construct
KTINGSGSPHSLCLNQQT

SEQ ID NO: 3944 - protein, 18 aa, synthetic construct
KTINGSGSPHSKAFVRQT

SEQ ID NO: 3945 - protein, 18 aa, synthetic construct
KPPLGSGSPHSKAQNQQT

SEQ ID NO: 3946 - protein, 18 aa, synthetic construct
KTINGSGSPHRPWQNQQT

SEQ ID NO: 3947 - protein, 18 aa, synthetic construct
KPARGSGSPHSKAQNQQT

SEQ ID NO: 3948 - protein, 18 aa, synthetic construct
KTINGSGSPHRPRQNQQT

SEQ ID NO: 3949 - protein, 18 aa, synthetic construct
KTINGSGSPHSCPQNQQT

SEQ ID NO: 3950 - protein, 18 aa, synthetic construct
KTINGSGSPHSKAQFILT

SEQ ID NO: 3951 - protein, 18 aa, synthetic construct
KTINGSGSPHSVRYNQQT

SEQ ID NO: 3952 - protein, 18 aa, synthetic construct
KSRRGSGSPHSKAQNQQT

SEQ ID NO: 3953 - protein, 18 aa, synthetic construct
KTINGSGSPHSVRCNQQT

SEQ ID NO: 3954 - protein, 18 aa, synthetic construct
KFFHGSGSPHSKAQNQQT

SEQ ID NO: 3955 - protein, 18 aa, synthetic construct
KTINGSGSPHSKMPCQQT

SEQ ID NO: 3956 - protein, 18 aa, synthetic construct
KTINGSGSPHSKKTSQQT

SEQ ID NO: 3957 - protein, 18 aa, synthetic construct
KRYNGSGSPHSKAQNQQT

SEQ ID NO: 3958 - protein, 18 aa, synthetic construct
KTINGSGSPHSLPYNQQT

SEQ ID NO: 3959 - protein, 18 aa, synthetic construct
KTINGSGSPHVYHQNQQT

SEQ ID NO: 3960 - protein, 18 aa, synthetic construct
KTINGSGSPHSKAQSRKT

SEQ ID NO: 3961 - protein, 18 aa, synthetic construct
KTINGSGSPHSYTRNQQT

SEQ ID NO: 3962 - protein, 18 aa, synthetic construct
KTINGSGSPHLVYQNQQT

SEQ ID NO: 3963 - protein, 18 aa, synthetic construct
KTINGSGSPHSKALRWQT

SEQ ID NO: 3964 - protein, 18 aa, synthetic construct
KTINGSGSPHYRYQNQQT

SEQ ID NO: 3965 - protein, 18 aa, synthetic construct
KTINGSGSPHSWLKNQQT

SEQ ID NO: 3966 - protein, 18 aa, synthetic construct
KTINGSGSPHSKAQMQIT

SEQ ID NO: 3967 - protein, 18 aa, synthetic construct
KTINGSGSPHCPAQNQQT

SEQ ID NO: 3968 - protein, 18 aa, synthetic construct
KTINGSGSPHSMCTNQQT

SEQ ID NO: 3969 - protein, 18 aa, synthetic construct
KTINGSGSPHSPPDNQQT

SEQ ID NO: 3970 - protein, 18 aa, synthetic construct
KTINGSGSPHSKRNYQQT

SEQ ID NO: 3971 - protein, 18 aa, synthetic construct
KTINGSGSPHRWTQNQQT

SEQ ID NO: 3972 - protein, 18 aa, synthetic construct
KTINGSGSPHSKACRLQT

SEQ ID NO: 3973 - protein, 18 aa, synthetic construct
KTINGSGSPHPRKQNQQT

SEQ ID NO: 3974 - protein, 18 aa, synthetic construct
KTINGSGSPHSKCSVQQT

SEQ ID NO: 3975 - protein, 18 aa, synthetic construct
KTINGSGSPHSKAQYVRT

SEQ ID NO: 3976 - protein, 18 aa, synthetic construct
KTINGSGSPHSKARISQT

SEQ ID NO: 3977 - protein, 18 aa, synthetic construct
KTINGSGSPHPFVQNQQT

SEQ ID NO: 3978 - protein, 18 aa, synthetic construct
KTINGSGSPHSKLPKQQT

SEQ ID NO: 3979 - protein, 18 aa, synthetic construct
KTINGSGSPHSKSEQQQT

SEQ ID NO: 3980 - protein, 18 aa, synthetic construct
KTINGSGSPHWVAQNQQT

SEQ ID NO: 3981 - protein, 18 aa, synthetic construct
KTINGSGSPHSLYQNQQT

SEQ ID NO: 3982 - protein, 18 aa, synthetic construct
KTINGSGSPHSKVRMQQT

SEQ ID NO: 3983 - protein, 18 aa, synthetic construct
KTINYTRSPHSKAQNQQT

SEQ ID NO: 3984 - protein, 18 aa, synthetic construct
KTINGSGSPHSSCTNQQT

SEQ ID NO: 3985 - protein, 18 aa, synthetic construct
KTINGSGSPHSKNSRQQT

SEQ ID NO: 3986 - protein, 18 aa, synthetic construct
KTINGSGSPHSKRKRQQT

SEQ ID NO: 3987 - protein, 18 aa, synthetic construct
KTINGSGSPHLCTQNQQT

SEQ ID NO: 3988 - protein, 18 aa, synthetic construct
KTINGSGSPHSKAQSAKT

SEQ ID NO: 3989 - protein, 18 aa, synthetic construct
KTINGSGSPHSTCLNQQT

SEQ ID NO: 3990 - protein, 18 aa, synthetic construct
KTINGSGSPHSYARNQQT

SEQ ID NO: 3991 - protein, 18 aa, synthetic construct
KTINGSGSPHSKQRPQQT

SEQ ID NO: 3992 - protein, 18 aa, synthetic construct
KTINGSGSPHSKRVVQQT

SEQ ID NO: 3993 - protein, 18 aa, synthetic construct
KRFSGSGSPHSKAQNQQT

SEQ ID NO: 3994 - protein, 18 aa, synthetic construct
KTINGSGSPHKSGQNPQT

SEQ ID NO: 3995 - protein, 18 aa, synthetic construct
KTINGSGSPHSKALRHQT

SEQ ID NO: 3996 - protein, 18 aa, synthetic construct
KTINGSGSPHSYYSNQQT

SEQ ID NO: 3997 - protein, 18 aa, synthetic construct
KTINGSGSPHSLTCNQQT

SEQ ID NO: 3998 - protein, 18 aa, synthetic construct
KTINGSGSPHSCQSNQQT

SEQ ID NO: 3999 - protein, 18 aa, synthetic construct
KTINGSGSPHSKAQSIKT

SEQ ID NO: 4000 - protein, 18 aa, synthetic construct
KYSMGSGSPHSKAQNQQT

SEQ ID NO: 4001 - protein, 18 aa, synthetic construct
KTINGSGSPHSKAKGWQT

SEQ ID NO: 4002 - protein, 18 aa, synthetic construct
KTIVGSGSPHSKPQNQQT

SEQ ID NO: 4003 - protein, 18 aa, synthetic construct
KTINGSGSPHFPFQNQQT

SEQ ID NO: 4004 - protein, 18 aa, synthetic construct
KPFLGSGSPHSKAQNQQT

SEQ ID NO: 4005 - protein, 18 aa, synthetic construct
KTINGSGSPHSKCTSQQT

SEQ ID NO: 4006 - protein, 18 aa, synthetic construct
KTINGSGSPHSVFENQQT

SEQ ID NO: 4007 - protein, 18 aa, synthetic construct
KTINGSGSPHSKAKKVQT

SEQ ID NO: 4008 - protein, 18 aa, synthetic construct
KTINGSGSPHSKAQRCST

SEQ ID NO: 4009 - protein, 18 aa, synthetic construct
KTINGSGSPHSKAQFCLT

SEQ ID NO: 4010 - protein, 18 aa, synthetic construct
KTINGSGSPHGRYQNQQT

SEQ ID NO: 4011 - protein, 18 aa, synthetic construct
KTQRKSGSPHSKAQNQQT

SEQ ID NO: 4012 - protein, 18 aa, synthetic construct
KTINGSYSPHCLAQNQQT

SEQ ID NO: 4013 - protein, 18 aa, synthetic construct
KTINGSLSPHFWAQNQQT

SEQ ID NO: 4014 - protein, 18 aa, synthetic construct
KTINHRISPHSKAQNQQT

SEQ ID NO: 4015 - protein, 18 aa, synthetic construct
KTRRPSGSPHSKAQNQQT

SEQ ID NO: 4016 - protein, 18 aa, synthetic construct
KTINGAYSPHRKAQNQQT

SEQ ID NO: 4017 - protein, 18 aa, synthetic construct
KTINGRRSPHGKAQNQQT

SEQ ID NO: 4018 - protein, 18 aa, synthetic construct
KTINGRTSPHRKAQNQQT

SEQ ID NO: 4019 - protein, 18 aa, synthetic construct
KTINGSRSPHAWAQNQQT

SEQ ID NO: 4020 - protein, 18 aa, synthetic construct
KTINKCLSPHSKAQNQQT

SEQ ID NO: 4021 - protein, 18 aa, synthetic construct
KTINGSSSPHRCAQNQQT

SEQ ID NO: 4022 - protein, 18 aa, synthetic construct
KTINCRTSPHSKAQNQQT

SEQ ID NO: 4023 - protein, 18 aa, synthetic construct
KTIFDCGSPHSKAQNQQT

SEQ ID NO: 4024 - protein, 18 aa, synthetic construct
KTINSPRSPHSKAQNQQT

SEQ ID NO: 4025 - protein, 18 aa, synthetic construct
KTINGLDSPHRSRQNQQT

SEQ ID NO: 4026 - protein, 18 aa, synthetic construct
KTRTRSGSPHSKAQNQQT

SEQ ID NO: 4027 - protein, 18 aa, synthetic construct
KTINGSISPHCPAQNQQT

SEQ ID NO: 4028 - protein, 18 aa, synthetic construct
KTINGLVSPHRKAQNQQT

SEQ ID NO: 4029 - protein, 18 aa, synthetic construct
KTINALRSPHSKAQNQQT

SEQ ID NO: 4030 - protein, 18 aa, synthetic construct
KTICGRGSPHSKAQNQQT

SEQ ID NO: 4031 - protein, 18 aa, synthetic construct
KTTRKSGSPHSKAQNQQT

SEQ ID NO: 4032 - protein, 18 aa, synthetic construct
KTMQRSGSPHSKAQNQQT

SEQ ID NO: 4033 - protein, 18 aa, synthetic construct
KTINGSSSPHWMAQNQQT

SEQ ID NO: 4034 - protein, 18 aa, synthetic construct
KTRKRSGSPHSKAQNQQT

SEQ ID NO: 4035 - protein, 18 aa, synthetic construct
KTINFTRSPHSKAQNQQT

SEQ ID NO: 4036 - protein, 18 aa, synthetic construct
KTINNLRSPHSKAQNQQT

SEQ ID NO: 4037 - protein, 18 aa, synthetic construct
KTINGRPSPHGKAQNQQT

SEQ ID NO: 4038 - protein, 18 aa, synthetic construct
KTINWSRSPHSKAQNQQT

SEQ ID NO: 4039 - protein, 18 aa, synthetic construct
KTINGTRSPHKKAQNQQT

SEQ ID NO: 4040 - protein, 18 aa, synthetic construct
KTINGSVSPHCTAQNQQT

SEQ ID NO: 4041 - protein, 18 aa, synthetic construct
KTTRCSGSPHSKAQNQQT

SEQ ID NO: 4042 - protein, 18 aa, synthetic construct
KTKLCSGSPHSKAQNQQT

SEQ ID NO: 4043 - protein, 18 aa, synthetic construct
KTINLGCSPHSKAQNQQT

SEQ ID NO: 4044 - protein, 18 aa, synthetic construct
KTISGHDSPHISGQYQQT

SEQ ID NO: 4045 - protein, 18 aa, synthetic construct
KTINGRRSPHMKAQNQQT

SEQ ID NO: 4046 - protein, 18 aa, synthetic construct
KTINGPWSPHRKAQNQQT

SEQ ID NO: 4047 - protein, 18 aa, synthetic construct
KTINSCFSPHSKAQNQQT

SEQ ID NO: 4048 - protein, 18 aa, synthetic construct
KTIKRYGSPHSKAQNQQT

SEQ ID NO: 4049 - protein, 18 aa, synthetic construct
KTINRYSSPHSKAQNQQT

SEQ ID NO: 4050 - protein, 18 aa, synthetic construct
KTTGRSGSPHSKAQNQQT

SEQ ID NO: 4051 - protein, 18 aa, synthetic construct
KTINRQFSPHSKAQNQQT

SEQ ID NO: 4052 - protein, 18 aa, synthetic construct
KTITGHDSPHSKAQNQQT

SEQ ID NO: 4053 - protein, 18 aa, synthetic construct
KTINGSGSPHKSGQYQQT

SEQ ID NO: 4054 - protein, 18 aa, synthetic construct
KTINGSGSPHKSGQDQQT

SEQ ID NO: 4055 - protein, 18 aa, synthetic construct
KTINGSGSPHKSGQIQQT

SEQ ID NO: 4056 - protein, 18 aa, synthetic construct
KTINGSGSPHKSGRNQQT

SEQ ID NO: 4057 - protein, 18 aa, synthetic construct
KTINGSGSPHKSGKNQQT

SEQ ID NO: 4058 - protein, 18 aa, synthetic construct
KTIYGHDSPHSKAQNQQT

SEQ ID NO: 4059 - protein, 18 aa, synthetic construct
KTINGSGSPHKSGQNQQS

SEQ ID NO: 4060 - protein, 18 aa, synthetic construct
KTINGSGSPHKSGQNLQT

SEQ ID NO: 4061 - protein, 18 aa, synthetic construct
KAINGHDSPHSKAQNQQT

SEQ ID NO: 4062 - protein, 18 aa, synthetic construct
KTVNGHDSPHSKAQNQQT

SEQ ID NO: 4063 - protein, 18 aa, synthetic construct
KTIKGHDSPHSKAQNQQT

SEQ ID NO: 4064 - protein, 18 aa, synthetic construct
KSINGHDSPHSKAQNQQT

SEQ ID NO: 4065 - protein, 18 aa, synthetic construct
KTINGSGSPHKSGQTQQT

SEQ ID NO: 4066 - protein, 18 aa, synthetic construct
KTINGSGSPHKSGHNQQT

SEQ ID NO: 4067 - protein, 18 aa, synthetic construct
KTFNGHDSPHSKAQNQQT

SEQ ID NO: 4068 - protein, 18 aa, synthetic construct
KTINGSGSPHKSGLNQQT

SEQ ID NO: 4069 - protein, 18 aa, synthetic construct
KTINGHDSPHSKALNQQT

SEQ ID NO: 4070 - protein, 18 aa, synthetic construct
KTINGSGSPHKSGQNQLT

SEQ ID NO: 4071 - protein, 18 aa, synthetic construct
KTLNGHDSPHSKAQNQQT

SEQ ID NO: 4072 - protein, 18 aa, synthetic construct
KTINGSGSPHKSGQNQHT

SEQ ID NO: 4073 - protein, 18 aa, synthetic construct
KTIDGHDSPHSKAQNQQT

SEQ ID NO: 4074 - protein, 18 aa, synthetic construct
KTNNGHDSPHSKAQNQQT

SEQ ID NO: 4075 - protein, 18 aa, synthetic construct
KTINGSGSPHKSGQKQQT

SEQ ID NO: 4076 - protein, 18 aa, synthetic construct
KTINGSGSPHKSGQNRQT

SEQ ID NO: 4077 - protein, 18 aa, synthetic construct
KTINGSGSPHKSGQNQQN

SEQ ID NO: 4078 - protein, 18 aa, synthetic construct
KTINGSGSPHKSGQNQQA

SEQ ID NO: 4079 - protein, 18 aa, synthetic construct
KTINGHDSPHSKAHNQQT

SEQ ID NO: 4080 - protein, 18 aa, synthetic construct
KTINGHDSPHSKAQNQQT

SEQ ID NO: 4081 - protein, 18 aa, synthetic construct
KTINGSGSPHKSGQNQQP

SEQ ID NO: 4082 - protein, 18 aa, synthetic construct
KTINGHDSPHCKAQNQQT

SEQ ID NO: 4083 - protein, 18 aa, synthetic construct
KTINGHDSPHSKAQNQQS

SEQ ID NO: 4084 - protein, 18 aa, synthetic construct
KTINGSGSPHKSGQNQQT

SEQ ID NO: 4085 - protein, 18 aa, synthetic construct
KTINGHDSPDKSGQNQQT

SEQ ID NO: 4086 - protein, 18 aa, synthetic construct
KPINGHDSPHKSGQNHQS

SEQ ID NO: 4087 - protein, 18 aa, synthetic construct
KTSNGSGSPHKSGQNQQT

SEQ ID NO: 4088 - protein, 18 aa, synthetic construct
KTVNGSGSPHKSGQNQQT

SEQ ID NO: 4089 - protein, 18 aa, synthetic construct
KTINGHDSTHKSGHNQQT

SEQ ID NO: 4090 - protein, 18 aa, synthetic construct
KTINGHDSPHSKAQNQQN

SEQ ID NO: 4091 - protein, 18 aa, synthetic construct
KTIYGSGSPHKSGQNQQT

SEQ ID NO: 4092 - protein, 18 aa, synthetic construct
KTINGLDSQHKSGQNQQT

SEQ ID NO: 4093-4094 - skipped (2 entries)

SEQ ID NO: 4095 - protein, 18 aa, synthetic construct
KTIIGHDSPHSKAQNQQT

SEQ ID NO: 4096 - protein, 18 aa, synthetic construct
KTSNGHDSPHSKAQNQQT

SEQ ID NO: 4097 - protein, 18 aa, synthetic construct
KTINGSGSPHSKAQNRRR

SEQ ID NO: 4098 - protein, 18 aa, synthetic construct
KTISKRGSPHSKAQNQQT

SEQ ID NO: 4099 - protein, 18 aa, synthetic construct
KGLGGSGSPHSKAQNQQT

SEQ ID NO: 4100 - protein, 18 aa, synthetic construct
KTINGHDSPHSKAQNLQT

SEQ ID NO: 4101 - protein, 18 aa, synthetic construct
KTINGHDSPHSKAQNQQI

SEQ ID NO: 4102 - protein, 18 aa, synthetic construct
KTINGSGSPHFTRQNQQT

SEQ ID NO: 4103 - protein, 18 aa, synthetic construct
KTINGSGSPHSLPWNQQT

SEQ ID NO: 4104 - protein, 18 aa, synthetic construct
KTINGHDSPHSKAQNHQT

SEQ ID NO: 4105 - protein, 18 aa, synthetic construct
KTMNGHDSPHSKAQNQQT

SEQ ID NO: 4106 - protein, 18 aa, synthetic construct
KPYKGSGSPHSKAQNQQT

SEQ ID NO: 4107 - protein, 18 aa, synthetic construct
KRLWGSGSPHSKAQNQQT

SEQ ID NO: 4108 - protein, 18 aa, synthetic construct
KRMRGSGSPHSKAQNQQT

SEQ ID NO: 4109 - protein, 18 aa, synthetic construct
KRTYGSGSPHSKAQNQQT

SEQ ID NO: 4110 - protein, 18 aa, synthetic construct
KTINCLRSPHSKAQNQQT

SEQ ID NO: 4111 - protein, 18 aa, synthetic construct
KTINFSRSPHSKAQNQQT

SEQ ID NO: 4112 - protein, 18 aa, synthetic construct
KTINGLRSPHFKAQNQQT

SEQ ID NO: 4113 - protein, 18 aa, synthetic construct
KTINGNRSPHNKAQNQQT

SEQ ID NO: 4114 - protein, 18 aa, synthetic construct
KTINGPRSPHYKAQNQQT

SEQ ID NO: 4115 - protein, 18 aa, synthetic construct
KTINGQASPHWKAQNQQT

SEQ ID NO: 4116 - protein, 18 aa, synthetic construct
KTINGRCSPHSKAQNQQT

SEQ ID NO: 4117 - protein, 18 aa, synthetic construct
KTINGRHSPHSKAQNQQT

SEQ ID NO: 4118 - protein, 18 aa, synthetic construct
KTINGRKSPHRKAQNQQT

SEQ ID NO: 4119 - protein, 18 aa, synthetic construct
KTINGRLSPHWKAQNQQT

SEQ ID NO: 4120 - protein, 18 aa, synthetic construct
KTINGRLSPHYKAQNQQT

SEQ ID NO: 4121 - protein, 18 aa, synthetic construct
KTINGRPSPHMKAQNQQT

SEQ ID NO: 4122 - protein, 18 aa, synthetic construct
KTINGRSSPHWKAQNQQT

SEQ ID NO: 4123 - protein, 18 aa, synthetic construct
KTINGRWSPHSKAQNQQT

SEQ ID NO: 4124 - protein, 18 aa, synthetic construct
KTINGSGSPHAPCQNQQT

SEQ ID NO: 4125 - protein, 18 aa, synthetic construct
KTINGSGSPHAWAQNQQT

SEQ ID NO: 4126 - protein, 18 aa, synthetic construct
KTINGSGSPHCMRQNQQT

SEQ ID NO: 4127 - protein, 18 aa, synthetic construct
KTINGSGSPHFCSQNQQT

SEQ ID NO: 4128 - protein, 18 aa, synthetic construct
KTINGSGSPHFLFQNQQT

SEQ ID NO: 4129 - protein, 18 aa, synthetic construct
KTINGSGSPHFWAQNQQT

SEQ ID NO: 4130 - protein, 18 aa, synthetic construct
KTINGSGSPHLCAQNQQT

SEQ ID NO: 4131 - protein, 18 aa, synthetic construct
KTINGSGSPHLRYQNQQT

SEQ ID NO: 4132 - protein, 18 aa, synthetic construct
KTINGSGSPHLYYQNQQT

SEQ ID NO: 4133 - protein, 18 aa, synthetic construct
KTINGSGSPHPLCQNQQT

SEQ ID NO: 4134 - protein, 18 aa, synthetic construct
KTINGSGSPHRIRQNQQT

SEQ ID NO: 4135 - protein, 18 aa, synthetic construct
KTINGSGSPHRLFQNQQT

SEQ ID NO: 4136 - protein, 18 aa, synthetic construct
KTINGSGSPHSCGQNQQT

SEQ ID NO: 4137 - protein, 18 aa, synthetic construct
KTINGSGSPHSCLRNQQT

SEQ ID NO: 4138 - protein, 18 aa, synthetic construct
KTINGSGSPHSCLSNQQT

SEQ ID NO: 4139 - protein, 18 aa, synthetic construct
KTINGSGSPHSCRLNQQT

SEQ ID NO: 4140 - protein, 18 aa, synthetic construct
KTINGSGSPHSCSLNQQT

SEQ ID NO: 4141 - protein, 18 aa, synthetic construct
KTINGSGSPHSKACTLQT

SEQ ID NO: 4142 - protein, 18 aa, synthetic construct
KTINGSGSPHSKAFRAQT

SEQ ID NO: 4143 - protein, 18 aa, synthetic construct
KTINGSGSPHSKAIRKQT

SEQ ID NO: 4144 - protein, 18 aa, synthetic construct
KTINGSGSPHSKAQASRT

SEQ ID NO: 4145 - protein, 18 aa, synthetic construct
KTINGSGSPHSKAQFELT

SEQ ID NO: 4146 - protein, 18 aa, synthetic construct
KTINGSGSPHSKAQIVIT

SEQ ID NO: 4147 - protein, 18 aa, synthetic construct
KTINGSGSPHSKAQLART

SEQ ID NO: 4148 - protein, 18 aa, synthetic construct
KTINGSGSPHSKAQLQRT

SEQ ID NO: 4149 - protein, 18 aa, synthetic construct
KTINGSGSPHSKAQNARR

SEQ ID NO: 4150 - protein, 18 aa, synthetic construct
KTINGSGSPHSKAQNCPR

SEQ ID NO: 4151 - protein, 18 aa, synthetic construct
KTINGSGSPHSKAQNMRR

SEQ ID NO: 4152 - protein, 18 aa, synthetic construct
KTINGSGSPHSKAQNRRV

SEQ ID NO: 4153 - protein, 18 aa, synthetic construct
KTINGSGSPHSKAQPSRT

SEQ ID NO: 4154 - protein, 18 aa, synthetic construct
KTINGSGSPHSKAQQVKT

SEQ ID NO: 4155 - protein, 18 aa, synthetic construct
KTINGSGSPHSKAQQVRT

SEQ ID NO: 4156 - protein, 18 aa, synthetic construct
KTINGSGSPHSKAQRLKT

SEQ ID NO: 4157 - protein, 18 aa, synthetic construct
KTINGSGSPHSKAQRRAT

SEQ ID NO: 4158 - protein, 18 aa, synthetic construct
KTINGSGSPHSKAQRRGT

SEQ ID NO: 4159 - protein, 18 aa, synthetic construct
KTINGSGSPHSKAQRRRT

SEQ ID NO: 4160 - protein, 18 aa, synthetic construct
KTINGSGSPHSKAQRTRT

SEQ ID NO: 4161 - protein, 18 aa, synthetic construct
KTINGSGSPHSKAQRVHT

SEQ ID NO: 4162 - protein, 18 aa, synthetic construct
KTINGSGSPHSKAQTYRT

SEQ ID NO: 4163 - protein, 18 aa, synthetic construct
KTINGSGSPHSKAQVRKT

SEQ ID NO: 4164 - protein, 18 aa, synthetic construct
KTINGSGSPHSKARGRQT

SEQ ID NO: 4165 - protein, 18 aa, synthetic construct
KTINGSGSPHSKARLCQT

SEQ ID NO: 4166 - protein, 18 aa, synthetic construct
KTINGSGSPHSKARLKQT

SEQ ID NO: 4167 - protein, 18 aa, synthetic construct
KTINGSGSPHSKARNSQT

SEQ ID NO: 4168 - protein, 18 aa, synthetic construct
KTINGSGSPHSKARWVQT

SEQ ID NO: 4169 - protein, 18 aa, synthetic construct
KTINGSGSPHSKAVRWQT

SEQ ID NO: 4170 - protein, 18 aa, synthetic construct
KTINGSGSPHSKAYTRQT

SEQ ID NO: 4171 - protein, 18 aa, synthetic construct
KTINGSGSPHSKCQSQQT

SEQ ID NO: 4172 - protein, 18 aa, synthetic construct
KTINGSGSPHSKFLRQQT

SEQ ID NO: 4173 - protein, 18 aa, synthetic construct
KTINGSGSPHSKFRFQQT

SEQ ID NO: 4174 - protein, 18 aa, synthetic construct
KTINGSGSPHSKFRLQQT

SEQ ID NO: 4175 - protein, 18 aa, synthetic construct
KTINGSGSPHSKFRRQQT

SEQ ID NO: 4176 - protein, 18 aa, synthetic construct
KTINGSGSPHSKGMKQQT

SEQ ID NO: 4177 - protein, 18 aa, synthetic construct
KTINGSGSPHSKKLRQQT

SEQ ID NO: 4178 - protein, 18 aa, synthetic construct
KTINGSGSPHSKKRPQQT

SEQ ID NO: 4179 - protein, 18 aa, synthetic construct
KTINGSGSPHSKKSRQQT

SEQ ID NO: 4180 - protein, 18 aa, synthetic construct
KTINGSGSPHSKLYRQQT

SEQ ID NO: 4181 - protein, 18 aa, synthetic construct
KTINGSGSPHSKLYWQQT

SEQ ID NO: 4182 - protein, 18 aa, synthetic construct
KTINGSGSPHSKPRMQQT

SEQ ID NO: 4183 - protein, 18 aa, synthetic construct
KTINGSGSPHSKRFPQQT

SEQ ID NO: 4184 - protein, 18 aa, synthetic construct
KTINGSGSPHSKRFRQQT

SEQ ID NO: 4185 - protein, 18 aa, synthetic construct
KTINGSGSPHSKRPYQQT

SEQ ID NO: 4186 - protein, 18 aa, synthetic construct
KTINGSGSPHSKRRMQQT

SEQ ID NO: 4187 - protein, 18 aa, synthetic construct
KTINGSGSPHSKRSKQQT

SEQ ID NO: 4188 - protein, 18 aa, synthetic construct
KTINGSGSPHSKRSRQQT

SEQ ID NO: 4189 - protein, 18 aa, synthetic construct
KTINGSGSPHSKRTMQQT

SEQ ID NO: 4190 - protein, 18 aa, synthetic construct
KTINGSGSPHSKRTRQQT

SEQ ID NO: 4191 - protein, 18 aa, synthetic construct
KTINGSGSPHSKRVRQQT

SEQ ID NO: 4192 - protein, 18 aa, synthetic construct
KTINGSGSPHSKRYIQQT

SEQ ID NO: 4193 - protein, 18 aa, synthetic construct
KTINGSGSPHSKRYNQQT

SEQ ID NO: 4194 - protein, 18 aa, synthetic construct
KTINGSGSPHSKRYPQQT

SEQ ID NO: 4195 - protein, 18 aa, synthetic construct
KTINGSGSPHSKRYSQQT

SEQ ID NO: 4196 - protein, 18 aa, synthetic construct
KTINGSGSPHSKTCIQQT

SEQ ID NO: 4197 - protein, 18 aa, synthetic construct
KTINGSGSPHSKWLTQQT

SEQ ID NO: 4198 - protein, 18 aa, synthetic construct
KTINGSGSPHSKWVVQQT

SEQ ID NO: 4199 - protein, 18 aa, synthetic construct
KTINGSGSPHSKYRLQQT

SEQ ID NO: 4200 - protein, 18 aa, synthetic construct
KTINGSGSPHSKYSKQQT

SEQ ID NO: 4201 - protein, 18 aa, synthetic construct
KTINGSGSPHSKYSRQQT

SEQ ID NO: 4202 - protein, 18 aa, synthetic construct
KTINGSGSPHSLKRNQQT

SEQ ID NO: 4203 - protein, 18 aa, synthetic construct
KTINGSGSPHSLWFNQQT

SEQ ID NO: 4204 - protein, 18 aa, synthetic construct
KTINGSGSPHSLWPNQQT

SEQ ID NO: 4205 - protein, 18 aa, synthetic construct
KTINGSGSPHSLWTNQQT

SEQ ID NO: 4206 - protein, 18 aa, synthetic construct
KTINGSGSPHSMRRNQQT

SEQ ID NO: 4207 - protein, 18 aa, synthetic construct
KTINGSGSPHSPCLNQQT

SEQ ID NO: 4208 - protein, 18 aa, synthetic construct
KTINGSGSPHSQWQNQQT

SEQ ID NO: 4209 - protein, 18 aa, synthetic construct
KTINGSGSPHSRCANQQT

SEQ ID NO: 4210 - protein, 18 aa, synthetic construct
KTINGSGSPHSRIRNQQT

SEQ ID NO: 4211 - protein, 18 aa, synthetic construct
KTINGSGSPHSRKSNQQT

SEQ ID NO: 4212 - protein, 18 aa, synthetic construct
KTINGSGSPHSRLWNQQT

SEQ ID NO: 4213 - protein, 18 aa, synthetic construct
KTINGSGSPHSRRFNQQT

SEQ ID NO: 4214 - protein, 18 aa, synthetic construct
KTINGSGSPHSRRPNQQT

SEQ ID NO: 4215 - protein, 18 aa, synthetic construct
KTINGSGSPHSRSCNQQT

SEQ ID NO: 4216 - protein, 18 aa, synthetic construct
KTINGSGSPHSRSKNQQT

SEQ ID NO: 4217 - protein, 18 aa, synthetic construct
KTINGSGSPHSRTKNQQT

SEQ ID NO: 4218 - protein, 18 aa, synthetic construct
KTINGSGSPHSRWLNQQT

SEQ ID NO: 4219 - protein, 18 aa, synthetic construct
KTINGSGSPHSSVCNQQT

SEQ ID NO: 4220 - protein, 18 aa, synthetic construct
KTINGSGSPHSSWRNQQT

SEQ ID NO: 4221 - protein, 18 aa, synthetic construct
KTINGSGSPHSVCQNQQT

SEQ ID NO: 4222 - protein, 18 aa, synthetic construct
KTINGSGSPHSVLCNQQT

SEQ ID NO: 4223 - protein, 18 aa, synthetic construct
KTINGSGSPHSVRRNQQT

SEQ ID NO: 4224 - protein, 18 aa, synthetic construct
KTINGSGSPHSVSCNQQT

SEQ ID NO: 4225 - protein, 18 aa, synthetic construct
KTINGSGSPHSWALNQQT

SEQ ID NO: 4226 - protein, 18 aa, synthetic construct
KTINGSGSPHSWITNQQT

SEQ ID NO: 4227 - protein, 18 aa, synthetic construct
KTINGSGSPHSWPMNQQT

SEQ ID NO: 4228 - protein, 18 aa, synthetic construct
KTINGSGSPHSWRSNQQT

SEQ ID NO: 4229 - protein, 18 aa, synthetic construct
KTINGSGSPHSYFLNQQT

SEQ ID NO: 4230 - protein, 18 aa, synthetic construct
KTINGSGSPHSYTYNQQT

SEQ ID NO: 4231 - protein, 18 aa, synthetic construct
KTINGSGSPHSYWQNQQT

SEQ ID NO: 4232 - protein, 18 aa, synthetic construct
KTINGSGSPHTLCQNQQT

SEQ ID NO: 4233 - protein, 18 aa, synthetic construct
KTINGSGSPHWLRQNQQT

SEQ ID NO: 4234 - protein, 18 aa, synthetic construct
KTINGSGSPHWPSQNQQT

SEQ ID NO: 4235 - protein, 18 aa, synthetic construct
KTINGSGSPHYLRQNQQT

SEQ ID NO: 4236 - protein, 18 aa, synthetic construct
KTINGSGSPHYTRQNQQT

SEQ ID NO: 4237 - protein, 18 aa, synthetic construct
KTINGSLSPHLWAQNQQT

SEQ ID NO: 4238 - protein, 18 aa, synthetic construct
KTINGSPSPHCQAQNQQT

SEQ ID NO: 4239 - protein, 18 aa, synthetic construct
KTINGSRSPHLCAQNQQT

SEQ ID NO: 4240 - protein, 18 aa, synthetic construct
KTINGSRSPHWRAQNQQT

SEQ ID NO: 4241 - protein, 18 aa, synthetic construct
KTINGSVSPHWLAQNQQT

SEQ ID NO: 4242 - protein, 18 aa, synthetic construct
KTINGTFSPHRKAQNQQT

SEQ ID NO: 4243 - protein, 18 aa, synthetic construct
KTINGWTSPHRKAQNQQT

SEQ ID NO: 4244 - protein, 18 aa, synthetic construct
KTINRGISPHSKAQNQQT

SEQ ID NO: 4245 - protein, 18 aa, synthetic construct
KTINTVRSPHSKAQNQQT

SEQ ID NO: 4246 - protein, 18 aa, synthetic construct
KTKLRSGSPHSKAQNQQT

SEQ ID NO: 4247 - protein, 18 aa, synthetic construct
KTRLRSGSPHSKAQNQQT

SEQ ID NO: 4248 - protein, 18 aa, synthetic construct
KWLLGSGSPHSKAQNQQT

SEQ ID NO: 4249 - protein, 18 aa, synthetic construct
KWSQGSGSPHSKAQNQQT

SEQ ID NO: 4250 - protein, 18 aa, synthetic construct
KWYLGSGSPHSKAQNQQT

SEQ ID NO: 4251 - protein, 18 aa, synthetic construct
KYHSGSGSPHSKAQNQQT

SEQ ID NO: 4252 - protein, 18 aa, synthetic construct
KYLPGSGSPHSKAQNQQT

SEQ ID NO: 4253 - protein, 18 aa, synthetic construct
KAINGGGSPHSKTQNQQT

SEQ ID NO: 4254 - protein, 18 aa, synthetic construct
KAINGHDSPHKRSPNQQT

SEQ ID NO: 4255 - protein, 18 aa, synthetic construct
KAINGHDSPHKSFSPQQT

SEQ ID NO: 4256 - protein, 18 aa, synthetic construct
KAINGHDSPHKSGENQQP

SEQ ID NO: 4257 - protein, 18 aa, synthetic construct
KAINGHDSPHKSGQLART

SEQ ID NO: 4258 - protein, 18 aa, synthetic construct
KAINGHDSPHKSGQNAFL

SEQ ID NO: 4259 - protein, 18 aa, synthetic construct
KAINGHDSPHKSGQNAYT

SEQ ID NO: 4260 - protein, 18 aa, synthetic construct
KAINGHDSPHKSGQNFAS

SEQ ID NO: 4261 - protein, 18 aa, synthetic construct
KAINGHDSPHKSGQNLAS

SEQ ID NO: 4262 - protein, 18 aa, synthetic construct
KAINGHDSPHKSGQNLGS

SEQ ID NO: 4263 - protein, 18 aa, synthetic construct
KAINGHDSPHKSGQNLKF

SEQ ID NO: 4264 - protein, 18 aa, synthetic construct
KAINGHDSPHKSGQNLLK

SEQ ID NO: 4265 - protein, 18 aa, synthetic construct
KAINGHDSPHKSGQNLSR

SEQ ID NO: 4266 - protein, 18 aa, synthetic construct
KAINGHDSPHKSGQNLSS

SEQ ID NO: 4267 - protein, 18 aa, synthetic construct
KAINGHDSPHKSGQNSLG

SEQ ID NO: 4268 - protein, 18 aa, synthetic construct
KAINGHDSPHKSGQNTLQ

SEQ ID NO: 4269 - protein, 18 aa, synthetic construct
KAINGHDSPHKSGQNTSL

SEQ ID NO: 4270 - protein, 18 aa, synthetic construct
KAINGHDSPHKSGQRLGT

SEQ ID NO: 4271 - protein, 18 aa, synthetic construct
KAINGHDSPHKSGQRNYT

SEQ ID NO: 4272 - protein, 18 aa, synthetic construct
KAINGHDSPHKSGQRPST

SEQ ID NO: 4273 - protein, 18 aa, synthetic construct
KAINGHDSPHKSGQRPVT

SEQ ID NO: 4274 - protein, 18 aa, synthetic construct
KAINGHDSPHKSGQVPST

SEQ ID NO: 4275 - protein, 18 aa, synthetic construct
KAINGHDSPHKSLSNQQT

SEQ ID NO: 4276 - protein, 18 aa, synthetic construct
KAINGHDSPHKSVLSQQT

SEQ ID NO: 4277 - protein, 18 aa, synthetic construct
KAINGHDSPHKTLQNQQT

SEQ ID NO: 4278 - protein, 18 aa, synthetic construct
KAINGHNSPHSKAQNQQT

SEQ ID NO: 4279 - protein, 18 aa, synthetic construct
KAINGLDSPHSKAQNQQT

SEQ ID NO: 4280 - protein, 18 aa, synthetic construct
KAINGSGSPHKSGQNQQT

SEQ ID NO: 4281 - protein, 18 aa, synthetic construct
KAINGSGSPHSKAQGQQT

SEQ ID NO: 4282 - protein, 18 aa, synthetic construct
KAINGSGSPHSKAQLSGT

SEQ ID NO: 4283 - protein, 18 aa, synthetic construct
KAINGSGSPHSKAQNGSL

SEQ ID NO: 4284 - protein, 18 aa, synthetic construct
KAINGSGSPHSKAQNSLL

SEQ ID NO: 4285 - protein, 18 aa, synthetic construct
KAINGSGSPHSKAVGLQT

SEQ ID NO: 4286 - protein, 18 aa, synthetic construct
KAINGSGSPHSKSLLQQT

SEQ ID NO: 4287 - protein, 18 aa, synthetic construct
KAINGSGSPHSKSLPQQT

SEQ ID NO: 4288 - protein, 18 aa, synthetic construct
KAINGSGSPHSKSTFQQT

SEQ ID NO: 4289 - protein, 18 aa, synthetic construct
KAITGHDSPHSKAQNQQT

SEQ ID NO: 4290 - protein, 18 aa, synthetic construct
KDVMGSGSPHSKAQNQQT

SEQ ID NO: 4291 - protein, 18 aa, synthetic construct
KEIVGSGSPHSKAQNQQT

SEQ ID NO: 4292 - protein, 18 aa, synthetic construct
KEIYGSGSPHSKAQNQQT

SEQ ID NO: 4293 - protein, 18 aa, synthetic construct
KELSGSGSPHSKAQNQQT

SEQ ID NO: 4294 - protein, 18 aa, synthetic construct
KETIGSGSPHSKAQNQQT

SEQ ID NO: 4295 - protein, 18 aa, synthetic construct
KEVLGSGSPHSKAQNQQT

SEQ ID NO: 4296 - protein, 18 aa, synthetic construct
KFALGHDSPHKSGQKQQT

SEQ ID NO: 4297 - protein, 18 aa, synthetic construct
KIINGHDSPHKSGQNLVL

SEQ ID NO: 4298 - protein, 18 aa, synthetic construct
KIINGHDSPHKSGQRNYT

SEQ ID NO: 4299 - protein, 18 aa, synthetic construct
KIINGHDSPHSKAQNQQT

SEQ ID NO: 4300 - protein, 18 aa, synthetic construct
KLNPGHDSPHKSGQTQQT

SEQ ID NO: 4301 - protein, 18 aa, synthetic construct
KLNRGHDSPHKSGQNQQS

SEQ ID NO: 4302 - protein, 18 aa, synthetic construct
KLSSGHDSPHKSGQNQQN

SEQ ID NO: 4303 - protein, 18 aa, synthetic construct
KNINGHDSPHSKAQNQQT

SEQ ID NO: 4304 - protein, 18 aa, synthetic construct
KNNDGSGSPHSKAQNQQT

SEQ ID NO: 4305 - protein, 18 aa, synthetic construct
KNVMGSGSPHSKAQNQQT

SEQ ID NO: 4306 - protein, 18 aa, synthetic construct
KPINGHDSPHKSGQNKLS

SEQ ID NO: 4307 - protein, 18 aa, synthetic construct
KPINGHDSPHKSGQNLSS

SEQ ID NO: 4308 - protein, 18 aa, synthetic construct
KPINGHDSPHSKAQNQQT

SEQ ID NO: 4309 - protein, 18 aa, synthetic construct
KRINGHDSPHSKAQNQQT

SEQ ID NO: 4310 - protein, 18 aa, synthetic construct
KSCSGHDSPHKSGQNQQS

SEQ ID NO: 4311 - protein, 18 aa, synthetic construct
KSINGHDSPHKSGQNLAS

SEQ ID NO: 4312 - protein, 18 aa, synthetic construct
KSINGHDSPHKSGQNLFL

SEQ ID NO: 4313 - protein, 18 aa, synthetic construct
KSINGHDSPHKSGQNLLM

SEQ ID NO: 4314 - protein, 18 aa, synthetic construct
KSINGHDSPHKSGQNLLQ

SEQ ID NO: 4315 - protein, 18 aa, synthetic construct
KSINGHDSPHKSGQNSLG

SEQ ID NO: 4316 - protein, 18 aa, synthetic construct
KSINGHDSPHKSGQNTLQ

SEQ ID NO: 4317 - protein, 18 aa, synthetic construct
KSINGHDSPHKSSSNQQT

SEQ ID NO: 4318 - protein, 18 aa, synthetic construct
KSINGHDSPHKYKLNQQT

SEQ ID NO: 4319 - protein, 18 aa, synthetic construct
KSINGSGSPHKSGQKQQT

SEQ ID NO: 4320 - protein, 18 aa, synthetic construct
KSINGSGSPHKSGQNQQT

SEQ ID NO: 4321 - protein, 18 aa, synthetic construct
KSINGSGSPHSKAQGLST

SEQ ID NO: 4322 - protein, 18 aa, synthetic construct
KSINGSGSPHSKAQLLGT

SEQ ID NO: 4323 - protein, 18 aa, synthetic construct
KSINGSGSPHSKTSWQQT

SEQ ID NO: 4324 - protein, 18 aa, synthetic construct
KSMNGHDSPHSKAQNQQT

SEQ ID NO: 4325 - protein, 18 aa, synthetic construct
KSTLGSGSPHSKAQNQHT

SEQ ID NO: 4326 - protein, 18 aa, synthetic construct
KSTLGSGSPHSKAQNQQN

SEQ ID NO: 4327 - protein, 18 aa, synthetic construct
KSTVGSGSPHSKAQTQQT

SEQ ID NO: 4328 - protein, 18 aa, synthetic construct
KTCKESGSPHSKAQNQQT

SEQ ID NO: 4329 - protein, 18 aa, synthetic construct
KTCKGSGSPHSKAQNQQT

SEQ ID NO: 4330 - protein, 18 aa, synthetic construct
KTCKSSGSPHSKAQNQQT

SEQ ID NO: 4331 - protein, 18 aa, synthetic construct
KTDMGSGSPHSKAQNQQT

SEQ ID NO: 4332 - protein, 18 aa, synthetic construct
KTDNGIGSPHSKAQNQQT

SEQ ID NO: 4333 - protein, 18 aa, synthetic construct
KTEGGSGSPHSKAQNQQT

SEQ ID NO: 4334 - protein, 18 aa, synthetic construct
KTEHHSGSPHSKAQNQQT

SEQ ID NO: 4335 - protein, 18 aa, synthetic construct
KTEKDSGSPHSKAQNQQT

SEQ ID NO: 4336 - protein, 18 aa, synthetic construct
KTELGHDSPHKRGQNQQT

SEQ ID NO: 4337 - protein, 18 aa, synthetic construct
KTESVSGSPHSKAQNQQT

SEQ ID NO: 4338 - protein, 18 aa, synthetic construct
KTETNSGSPHSKAQNQQT

SEQ ID NO: 4339 - protein, 18 aa, synthetic construct
KTETYSGSPHSKAQNQQT

SEQ ID NO: 4340 - protein, 18 aa, synthetic construct
KTEWLSGSPHSKAQNQQT

SEQ ID NO: 4341 - protein, 18 aa, synthetic construct
KTFNGSGSPHKSGQNQQT

SEQ ID NO: 4342 - protein, 18 aa, synthetic construct
KTGLRHDSPHKSGQKQQT

SEQ ID NO: 4343 - protein, 18 aa, synthetic construct
KTGLRHDSPHKSGQNQQS

SEQ ID NO: 4344 - protein, 18 aa, synthetic construct
KTGVTHDSPHKSGQKQQT

SEQ ID NO: 4345 - protein, 18 aa, synthetic construct
KTIDGHESPHSKAQNQQT

SEQ ID NO: 4346 - protein, 18 aa, synthetic construct
KTIEGHDSPHKSGQTQQT

SEQ ID NO: 4347 - protein, 18 aa, synthetic construct
KTIHGHDSPHSKAQNQQT

SEQ ID NO: 4348 - protein, 18 aa, synthetic construct
KTIHGHESPHSKAQNQQT

SEQ ID NO: 4349 - protein, 18 aa, synthetic construct
KTIIGHDSPHKSGQNRSS

SEQ ID NO: 4350 - protein, 18 aa, synthetic construct
KTIIGHDSPHKSGQRLGT

SEQ ID NO: 4351 - protein, 18 aa, synthetic construct
KTIIGSGSPHKSGQNQQT

SEQ ID NO: 4352 - protein, 18 aa, synthetic construct
KTIKGHDSPHKSGQNMLF

SEQ ID NO: 4353 - protein, 18 aa, synthetic construct
KTILGSGSPHSKAQNLQT

SEQ ID NO: 4354 - protein, 18 aa, synthetic construct
KTINGCSSPHWKAQNQQT

SEQ ID NO: 4355 - protein, 18 aa, synthetic construct
KTINGGGSTHSKAQNQQT

SEQ ID NO: 4356 - protein, 18 aa, synthetic construct
KTINGHDSPHKAGQSQQT

SEQ ID NO: 4357 - protein, 18 aa, synthetic construct
KTINGHDSPHKRGQNVPS

SEQ ID NO: 4358 - protein, 18 aa, synthetic construct
KTINGHDSPHKRGRSYQT

SEQ ID NO: 4359 - protein, 18 aa, synthetic construct
KTINGHDSPHKTGQNPPT

SEQ ID NO: 4360 - protein, 18 aa, synthetic construct
KTINGHDSPHSKAENQQT

SEQ ID NO: 4361 - protein, 18 aa, synthetic construct
KTINGHDSPHSKALSLQT

SEQ ID NO: 4362 - protein, 18 aa, synthetic construct
KTINGHDSPHSKAQGQQT

SEQ ID NO: 4363 - protein, 18 aa, synthetic construct
KTINGHDSPHSKAQHQQT

SEQ ID NO: 4364 - protein, 18 aa, synthetic construct
KTINGHDSPHSKAQIQQT

SEQ ID NO: 4365 - protein, 18 aa, synthetic construct
KTINGHDSPHSKAQKQQT

SEQ ID NO: 4366 - protein, 18 aa, synthetic construct
KTINGHDSPHSKAQNLSS

SEQ ID NO: 4367 - protein, 18 aa, synthetic construct
KTINGHDSPHSKAQNPQT

SEQ ID NO: 4368 - protein, 18 aa, synthetic construct
KTINGHDSPHSKAQNQET

SEQ ID NO: 4369 - protein, 18 aa, synthetic construct
KTINGHDSPHSKAQNQHT

SEQ ID NO: 4370 - protein, 18 aa, synthetic construct
KTINGHDSPHSKAQNQLT

SEQ ID NO: 4371 - protein, 18 aa, synthetic construct
KTINGHDSPHSKAQNQPT

SEQ ID NO: 4372 - protein, 18 aa, synthetic construct
KTINGHDSPHSKAQNQQA

SEQ ID NO: 4373 - protein, 18 aa, synthetic construct
KTINGHDSPHSKAQNTGS

SEQ ID NO: 4374 - protein, 18 aa, synthetic construct
KTINGHDSPHSKAQSQQT

SEQ ID NO: 4375 - protein, 18 aa, synthetic construct
KTINGHDSPHSKAQTQQT

SEQ ID NO: 4376 - protein, 18 aa, synthetic construct
KTINGHDSPHSKAQYQQT

SEQ ID NO: 4377 - protein, 18 aa, synthetic construct
KTINGHDSPHSKARNQQT

SEQ ID NO: 4378 - protein, 18 aa, synthetic construct
KTINGHDSPHSKLPGQQT

SEQ ID NO: 4379 - protein, 18 aa, synthetic construct
KTINGHDSPHSKSPNQQT

SEQ ID NO: 4380 - protein, 18 aa, synthetic construct
KTINGHESPHKSGQNAFL

SEQ ID NO: 4381 - protein, 18 aa, synthetic construct
KTINGIGSPHSKAPNEQT

SEQ ID NO: 4382 - protein, 18 aa, synthetic construct
KTINGQDSPHKSGQNLHM

SEQ ID NO: 4383 - protein, 18 aa, synthetic construct
KTINGRGSPHSKAQIGMT

SEQ ID NO: 4384 - protein, 18 aa, synthetic construct
KTINGRGSPHSKAQNQVL

SEQ ID NO: 4385 - protein, 18 aa, synthetic construct
KTINGRGSPHSKAQSPTT

SEQ ID NO: 4386 - protein, 18 aa, synthetic construct
KTINGRGSPHSKATSFQT

SEQ ID NO: 4387 - protein, 18 aa, synthetic construct
KTINGSGSPHFVVQNQQT

SEQ ID NO: 4388 - protein, 18 aa, synthetic construct
KTINGSGSPHKRGQKQQT

SEQ ID NO: 4389 - protein, 18 aa, synthetic construct
KTINGSGSPHKRGQNQET

SEQ ID NO: 4390 - protein, 18 aa, synthetic construct
KTINGSGSPHKRGQNQLT

SEQ ID NO: 4391 - protein, 18 aa, synthetic construct
KTINGSGSPHKRGRNQQT

SEQ ID NO: 4392 - protein, 18 aa, synthetic construct
KTINGSGSPHKSGGNQQT

SEQ ID NO: 4393 - protein, 18 aa, synthetic construct
KTINGSGSPHKSGHNQET

SEQ ID NO: 4394 - protein, 18 aa, synthetic construct
KTINGSGSPHKSGHNQLT

SEQ ID NO: 4395 - protein, 18 aa, synthetic construct
KTINGSGSPHKSGHNQQN

SEQ ID NO: 4396 - protein, 18 aa, synthetic construct
KTINGSGSPHKSGLNQLT

SEQ ID NO: 4397 - protein, 18 aa, synthetic construct
KTINGSGSPHKSGPNQQT

SEQ ID NO: 4398 - protein, 18 aa, synthetic construct
KTINGSGSPHKSGQGQQT

SEQ ID NO: 4399 - protein, 18 aa, synthetic construct
KTINGSGSPHKSGQHLQT

SEQ ID NO: 4400 - protein, 18 aa, synthetic construct
KTINGSGSPHKSGQHQQT

SEQ ID NO: 4401 - protein, 18 aa, synthetic construct
KTINGSGSPHKSGQKHQT

SEQ ID NO: 4402 - protein, 18 aa, synthetic construct
KTINGSGSPHKSGQKQQS

SEQ ID NO: 4403 - protein, 18 aa, synthetic construct
KTINGSGSPHKSGQNEQT

SEQ ID NO: 4404 - protein, 18 aa, synthetic construct
KTINGSGSPHKSGQNHQT

SEQ ID NO: 4405 - protein, 18 aa, synthetic construct
KTINGSGSPHKSGQNKQT

SEQ ID NO: 4406 - protein, 18 aa, synthetic construct
KTINGSGSPHKSGQNKTS

SEQ ID NO: 4407 - protein, 18 aa, synthetic construct
KTINGSGSPHKSGQNQEA

SEQ ID NO: 4408 - protein, 18 aa, synthetic construct
KTINGSGSPHKSGQNQET

SEQ ID NO: 4409 - protein, 18 aa, synthetic construct
KTINGSGSPHKSGQNQKT

SEQ ID NO: 4410 - protein, 18 aa, synthetic construct
KTINGSGSPHKSGQNQQI

SEQ ID NO: 4411 - protein, 18 aa, synthetic construct
KTINGSGSPHKSGQNQQR

SEQ ID NO: 4412 - protein, 18 aa, synthetic construct
KTINGSGSPHKSGQNQRT

SEQ ID NO: 4413 - protein, 18 aa, synthetic construct
KTINGSGSPHKSGQNQYT

SEQ ID NO: 4414 - protein, 18 aa, synthetic construct
KTINGSGSPHKSGQRQQT

SEQ ID NO: 4415 - protein, 18 aa, synthetic construct
KTINGSGSPHKSGQSQQT

SEQ ID NO: 4416 - protein, 18 aa, synthetic construct
KTINGSGSPHKSGQYQRT

SEQ ID NO: 4417 - protein, 18 aa, synthetic construct
KTINGSGSPHKSGRNQQA

SEQ ID NO: 4418 - protein, 18 aa, synthetic construct
KTINGSGSPHKSRHNQQT

SEQ ID NO: 4419 - protein, 18 aa, synthetic construct
KTINGSGSPHKSRQYQQT

SEQ ID NO: 4420 - protein, 18 aa, synthetic construct
KTINGSGSPHRKAQAPGT

SEQ ID NO: 4421 - protein, 18 aa, synthetic construct
KTINGSGSPHSKAAMKQT

SEQ ID NO: 4422 - protein, 18 aa, synthetic construct
KTINGSGSPHSKAGRQQT

SEQ ID NO: 4423 - protein, 18 aa, synthetic construct
KTINGSGSPHSKAGRTQT

SEQ ID NO: 4424 - protein, 18 aa, synthetic construct
KTINGSGSPHSKAKSNQT

SEQ ID NO: 4425 - protein, 18 aa, synthetic construct
KTINGSGSPHSKALKTQT

SEQ ID NO: 4426 - protein, 18 aa, synthetic construct
KTINGSGSPHSKAPRTQT

SEQ ID NO: 4427 - protein, 18 aa, synthetic construct
KTINGSGSPHSKAQAART

SEQ ID NO: 4428 - protein, 18 aa, synthetic construct
KTINGSGSPHSKAQAILT

SEQ ID NO: 4429 - protein, 18 aa, synthetic construct
KTINGSGSPHSKAQCRGT

SEQ ID NO: 4430 - protein, 18 aa, synthetic construct
KTINGSGSPHSKAQGLRT

SEQ ID NO: 4431 - protein, 18 aa, synthetic construct
KTINGSGSPHSKAQKGVL

SEQ ID NO: 4432 - protein, 18 aa, synthetic construct
KTINGSGSPHSKAQKSNT

SEQ ID NO: 4433 - protein, 18 aa, synthetic construct
KTINGSGSPHSKAQNNKF

SEQ ID NO: 4434 - protein, 18 aa, synthetic construct
KTINGSGSPHSKAQNRRT

SEQ ID NO: 4435 - protein, 18 aa, synthetic construct
KTINGSGSPHSKAQPKQT

SEQ ID NO: 4436 - protein, 18 aa, synthetic construct
KTINGSGSPHSKAQRAPT

SEQ ID NO: 4437 - protein, 18 aa, synthetic construct
KTINGSGSPHSKAQREHT

SEQ ID NO: 4438 - protein, 18 aa, synthetic construct
KTINGSGSPHSKAQRFGT

SEQ ID NO: 4439 - protein, 18 aa, synthetic construct
KTINGSGSPHSKAQRPCT

SEQ ID NO: 4440 - protein, 18 aa, synthetic construct
KTINGSGSPHSKAQRQAT

SEQ ID NO: 4441 - protein, 18 aa, synthetic construct
KTINGSGSPHSKAQRQPT

SEQ ID NO: 4442 - protein, 18 aa, synthetic construct
KTINGSGSPHSKAQTKLT

SEQ ID NO: 4443 - protein, 18 aa, synthetic construct
KTINGSGSPHSKAQTTHT

SEQ ID NO: 4444 - protein, 18 aa, synthetic construct
KTINGSGSPHSKAQVQRT

SEQ ID NO: 4445 - protein, 18 aa, synthetic construct
KTINGSGSPHSKAQVVRT

SEQ ID NO: 4446 - protein, 18 aa, synthetic construct
KTINGSGSPHSKAQWPNT

SEQ ID NO: 4447 - protein, 18 aa, synthetic construct
KTINGSGSPHSKAQYPST

SEQ ID NO: 4448 - protein, 18 aa, synthetic construct
KTINGSGSPHSKARALQT

SEQ ID NO: 4449 - protein, 18 aa, synthetic construct
KTINGSGSPHSKARDQHT

SEQ ID NO: 4450 - protein, 18 aa, synthetic construct
KTINGSGSPHSKARFQQT

SEQ ID NO: 4451 - protein, 18 aa, synthetic construct
KTINGSGSPHSKARRTQT

SEQ ID NO: 4452 - protein, 18 aa, synthetic construct
KTINGSGSPHSKARSLQT

SEQ ID NO: 4453 - protein, 18 aa, synthetic construct
KTINGSGSPHSKARVIQT

SEQ ID NO: 4454 - protein, 18 aa, synthetic construct
KTINGSGSPHSKAWYLQT

SEQ ID NO: 4455 - protein, 18 aa, synthetic construct
KTINGSGSPHSKGGGQQT

SEQ ID NO: 4456 - protein, 18 aa, synthetic construct
KTINGSGSPHSKGSRQQT

SEQ ID NO: 4457 - protein, 18 aa, synthetic construct
KTINGSGSPHSKLQRQQT

SEQ ID NO: 4458 - protein, 18 aa, synthetic construct
KTINGSGSPHSKMLRQQT

SEQ ID NO: 4459 - protein, 18 aa, synthetic construct
KTINGSGSPHSKSSIKQT

SEQ ID NO: 4460 - protein, 18 aa, synthetic construct
KTINGSGSPHSKVRFQQT

SEQ ID NO: 4461 - protein, 18 aa, synthetic construct
KTINGSGSPHSVVWNQQT

SEQ ID NO: 4462 - protein, 18 aa, synthetic construct
KTINGSTSPHKLAQNQQP

SEQ ID NO: 4463 - protein, 18 aa, synthetic construct
KTINRHDSPHKSGQRPST

SEQ ID NO: 4464 - protein, 18 aa, synthetic construct
KTINRIMSPHSKAQNQQT

SEQ ID NO: 4465 - protein, 18 aa, synthetic construct
KTINTARSPHSKAQNQQT

SEQ ID NO: 4466 - protein, 18 aa, synthetic construct
KTISGHDSPHSKAQNQQT

SEQ ID NO: 4467 - protein, 18 aa, synthetic construct
KTISGSGSPHKSGQNQQT

SEQ ID NO: 4468 - protein, 18 aa, synthetic construct
KTITGHDSPHKSGQRLGT

SEQ ID NO: 4469 - protein, 18 aa, synthetic construct
KTITGSGSPHKSGQNQQT

SEQ ID NO: 4470 - protein, 18 aa, synthetic construct
KTIYGHDSPHKSGQRLGT

SEQ ID NO: 4471 - protein, 18 aa, synthetic construct
KTLNGHDSPHKSGQNLFL

SEQ ID NO: 4472 - protein, 18 aa, synthetic construct
KTLNGHDSPHKSGQNLSS

SEQ ID NO: 4473 - protein, 18 aa, synthetic construct
KTLSFHDSPHKSGQNQQS

SEQ ID NO: 4474 - protein, 18 aa, synthetic construct
KTSNGSGSPHSKAQNTMT

SEQ ID NO: 4475 - protein, 18 aa, synthetic construct
KTTNGHDSPHSKAQNQQT

SEQ ID NO: 4476 - protein, 18 aa, synthetic construct
KTVNGGGSPHSKAQNQQT

SEQ ID NO: 4477 - protein, 18 aa, synthetic construct
KTVNGHDSPHKSGQNVSL

SEQ ID NO: 4478 - protein, 18 aa, synthetic construct
KTVNGHDSPHKSGQRPST

SEQ ID NO: 4479 - protein, 18 aa, synthetic construct
KTVNGHDSPHKSGQTQQA

SEQ ID NO: 4480 - protein, 18 aa, synthetic construct
KTVNGHESPHSKAQNQQT

SEQ ID NO: 4481 - protein, 18 aa, synthetic construct
KTVNGSGSPHSKAQGLST

SEQ ID NO: 4482 - protein, 18 aa, synthetic construct
KTVNGSGSPHSKAQNVTS

SEQ ID NO: 4483 - protein, 18 aa, synthetic construct
KTVPASGSPHSKAQNQQT

SEQ ID NO: 4484 - protein, 18 aa, synthetic construct
NTINGSGSPHSKAHNQQT

SEQ ID NO: 4485 - protein, 18 aa, synthetic construct
TTINGGGSPHSKAQNQQT

SEQ ID NO: 4486 - protein, 8 aa, synthetic construct
HDSPHSKA

SEQ ID NO: 4487 - protein, 9 aa, synthetic construct
NGSGQNQQT

SEQ ID NO: 4488-4672 - skipped (185 entries)

SEQ ID NO: 4673 - DNA, 23 bp, synthetic construct
  source 1..23: mol_type = other DNA
acaaacaccattgtcacactcca

SEQ ID NO: 4674 - DNA, 71 bp, synthetic construct
  source 1..71: mol_type = other DNA
acaaacaccattgtcacactccacacaaacaccattgtcacactccacacaaacaccattgtcacactcca

SEQ ID NO: 4675 - DNA, 23 bp, synthetic construct
  source 1..23: mol_type = other DNA
tccataaagtaggaaacactaca

SEQ ID NO: 4676 - DNA, 22 bp, synthetic construct
  source 1..22: mol_type = other DNA
agtgaattctaccagtgccata

SEQ ID NO: 4677 - DNA, 24 bp, synthetic construct
  source 1..24: mol_type = other DNA
agtgtgagttctaccattgccaaa

SEQ ID NO: 4678 - DNA, 23 bp, synthetic construct
  source 1..23: mol_type = other DNA
agcaaaaatgtgctagtgccaaa

SEQ ID NO: 4679 - DNA, 22 bp, synthetic construct
  source 1..22: mol_type = other DNA
atacatacttctttacattcca

SEQ ID NO: 4680 - protein, 7 aa, synthetic construct
TLAVPFK

SEQ ID NO: 4681 - protein, 18 aa, synthetic construct
KTINGSGSPHSKAQARKT

SEQ ID NO: 4682 - protein, 18 aa, synthetic construct
KYIVGSGSPHSKAQNQQT

SEQ ID NO: 4683 - protein, 18 aa, synthetic construct
KTINGSGSPHSMYMNQQT

SEQ ID NO: 4684 - protein, 18 aa, synthetic construct
KTINGSGSPHSKAFYRQT

SEQ ID NO: 4685 - protein, 18 aa, synthetic construct
KTINGSGSPHSKLKRQQT

SEQ ID NO: 4686 - protein, 18 aa, synthetic construct
KTINGSGSPHSKRHRQQT

SEQ ID NO: 4687 - protein, 18 aa, synthetic construct
KTINGSGSPHSKAQKCIT

SEQ ID NO: 4688 - protein, 18 aa, synthetic construct
KTINGSGSPHSKWRLQQT

SEQ ID NO: 4689 - protein, 18 aa, synthetic construct
KTINGSGSPHSRCRNQQT

SEQ ID NO: 4690 - protein, 18 aa, synthetic construct
KTINGSGSPHSFTCNQQT

SEQ ID NO: 4691 - protein, 18 aa, synthetic construct
KTINGSGSPHSKFFIQQT

SEQ ID NO: 4692 - protein, 18 aa, synthetic construct
KTINGSGSPHSKAQYSRT

SEQ ID NO: 4693 - protein, 18 aa, synthetic construct
KTINGSGSPHCALQNQQT

SEQ ID NO: 4694 - protein, 13 aa, synthetic construct
  VARIANT 7: note = S, C, F, or V
  VARIANT 8: note = K, L, R, I, E, Y, V, or S
  VARIANT 9: note = A, R, L, G, I, Y, S, F, or W
  VARIANT 10: note = W, Q, R, G, L, V, S, or F
  VARIANT 11: note = N, Y, R, C, K, or L
  VARIANT 12: note = Q, G, K, R, T, L, or Y
  VARIANT 13: note = Q, L, R, or V
GSGSPHXXXXXXX

SEQ ID NO: 4695 - protein, 6 aa, synthetic construct
GSGSPH

SEQ ID NO: 4696 - protein, 11 aa, synthetic construct
  VARIANT 7: note = S, I, F, V, C, Y, W, R, P, L, Q, M, K, or G
  VARIANT 8: note = K, M, R, F, V, C, P, Y, L, W, G, N, S, T, I, or A
  VARIANT 9: note = A, Y, L, R, W, C, T, F, H, I, P, M, K, S, V, G, Q, or N
  VARIANT 10: note = Q, M, F, K, H, R, C, W, P, V, L, G, S, Y, I, A, T, D, N, or E
  VARIANT 11: note = A, N, Y, R, K, L, I, M, Q, S, C, W, F, T, G, V, or P
GSGSPHXXXXX

SEQ ID NO: 4697 - protein, 9 aa, synthetic construct
GSGSPHSKA

SEQ ID NO: 4698 - protein, 9 aa, synthetic construct
GHDSPHKSG

SEQ ID NO: 4699 - protein, 12 aa, synthetic construct
  VARIANT 1: note = T, M, A, C, I, R, L, D, F, V, Q, N, or H
  VARIANT 2: note = I, P, E, N, D, S, A, T, M, or Q
  VARIANT 3: note = N, E, G, Y, W, M, T, I, K, Q, F, S, V, A, or L
  VARIANT 4: note = G, D, R, or E
  VARIANT 5: note = H, Q, N, or D
  VARIANT 6: note = D or R
XXXXXXSPHKSG

SEQ ID NO: 4700 - protein, 4 aa, synthetic construct
SPHS

SEQ ID NO: 4701 - protein, 5 aa, synthetic construct
SPHSK

SEQ ID NO: 4702 - protein, 4 aa, synthetic construct
HDSP

SEQ ID NO: 4703 - protein, 5 aa, synthetic construct
HDSPH

SEQ ID NO: 4704 - protein, 5 aa, synthetic construct
SPHKS

SEQ ID NO: 4705 - protein, 5 aa, synthetic construct
SPHAR

SEQ ID NO: 4706 - protein, 5 aa, synthetic construct
SPHVK

SEQ ID NO: 4707 - protein, 5 aa, synthetic construct
SPHAS

SEQ ID NO: 4708 - protein, 5 aa, synthetic construct
SPHKK

SEQ ID NO: 4709 - protein, 5 aa, synthetic construct
SPHVR

SEQ ID NO: 4710 - protein, 5 aa, synthetic construct
SPHRK

SEQ ID NO: 4711 - protein, 5 aa, synthetic construct
SPHKT

SEQ ID NO: 4712 - protein, 5 aa, synthetic construct
SPHKF

SEQ ID NO: 4713 - protein, 5 aa, synthetic construct
SPHKI

SEQ ID NO: 4714 - protein, 5 aa, synthetic construct
SPHKL

SEQ ID NO: 4715 - protein, 5 aa, synthetic construct
SPHKY

SEQ ID NO: 4716 - protein, 5 aa, synthetic construct
SPHTR

SEQ ID NO: 4717 - protein, 5 aa, synthetic construct
SPHKR

SEQ ID NO: 4718 - protein, 5 aa, synthetic construct
SPHGA

SEQ ID NO: 4719 - protein, 5 aa, synthetic construct
SPHSR

SEQ ID NO: 4720 - protein, 5 aa, synthetic construct
SPHSL

SEQ ID NO: 4721 - protein, 5 aa, synthetic construct
SPHSS

SEQ ID NO: 4722 - protein, 5 aa, synthetic construct
SPHFL

SEQ ID NO: 4723 - protein, 5 aa, synthetic construct
SPHWK

SEQ ID NO: 4724 - protein, 5 aa, synthetic construct
SPHGK

SEQ ID NO: 4725 - protein, 5 aa, synthetic construct
SPHTK

SEQ ID NO: 4726 - protein, 5 aa, synthetic construct
SPHNK

SEQ ID NO: 4727 - protein, 5 aa, synthetic construct
SPHAK

SEQ ID NO: 4728 - protein, 5 aa, synthetic construct
SPHKH

SEQ ID NO: 4729 - protein, 5 aa, synthetic construct
SPHKM

SEQ ID NO: 4730 - protein, 5 aa, synthetic construct
SPHRS

SEQ ID NO: 4731 - protein, 6 aa, synthetic construct
SPHSKT

SEQ ID NO: 4732 - protein, 6 aa, synthetic construct
SPHSKG

SEQ ID NO: 4733 - protein, 6 aa, synthetic construct
SPHGKA

SEQ ID NO: 4734 - protein, 6 aa, synthetic construct
SPHNKA

SEQ ID NO: 4735 - protein, 6 aa, synthetic construct
SPHSKN

SEQ ID NO: 4736 - protein, 6 aa, synthetic construct
SPHAKA

SEQ ID NO: 4737 - protein, 6 aa, synthetic construct
SPHSKV

SEQ ID NO: 4738 - protein, 6 aa, synthetic construct
SPHKTG

SEQ ID NO: 4739 - protein, 6 aa, synthetic construct
SPHTKA

SEQ ID NO: 4740 - protein, 6 aa, synthetic construct
SPHKSL

SEQ ID NO: 4741 - protein, 6 aa, synthetic construct
SPHKSE

SEQ ID NO: 4742 - protein, 6 aa, synthetic construct
SPHKSV

SEQ ID NO: 4743 - protein, 6 aa, synthetic construct
SPHKSW

SEQ ID NO: 4744 - protein, 6 aa, synthetic construct
SPHKSN

SEQ ID NO: 4745 - protein, 6 aa, synthetic construct
SPHKHG

SEQ ID NO: 4746 - protein, 6 aa, synthetic construct
SPHKSQ

SEQ ID NO: 4747 - protein, 6 aa, synthetic construct
SPHKSK

SEQ ID NO: 4748 - protein, 6 aa, synthetic construct
SPHKLW

SEQ ID NO: 4749 - protein, 6 aa, synthetic construct
SPHWKG

SEQ ID NO: 4750 - protein, 6 aa, synthetic construct
SPHKMG

SEQ ID NO: 4751 - protein, 6 aa, synthetic construct
SPHKMA

SEQ ID NO: 4752 - protein, 5 aa, synthetic construct
SGSPH

SEQ ID NO: 4753 - protein, 5 aa, synthetic construct
QDSPH

SEQ ID NO: 4754 - protein, 5 aa, synthetic construct
RGSPH

SEQ ID NO: 4755 - protein, 5 aa, synthetic construct
SHSPH

SEQ ID NO: 4756 - protein, 5 aa, synthetic construct
QSSPH

SEQ ID NO: 4757 - protein, 5 aa, synthetic construct
DDSPH

SEQ ID NO: 4758 - protein, 5 aa, synthetic construct
HESPH

SEQ ID NO: 4759 - protein, 5 aa, synthetic construct
NYSPH

SEQ ID NO: 4760 - protein, 5 aa, synthetic construct
VGSPH

SEQ ID NO: 4761 - protein, 5 aa, synthetic construct
SCSPH

SEQ ID NO: 4762 - protein, 5 aa, synthetic construct
LLSPH

SEQ ID NO: 4763 - protein, 5 aa, synthetic construct
NGSPH

SEQ ID NO: 4764 - protein, 5 aa, synthetic construct
PGSPH

SEQ ID NO: 4765 - protein, 5 aa, synthetic construct
GGSPH

SEQ ID NO: 4766 - protein, 5 aa, synthetic construct
TGSPH

SEQ ID NO: 4767 - protein, 5 aa, synthetic construct
SVSPH

SEQ ID NO: 4768 - protein, 5 aa, synthetic construct
IGSPH

SEQ ID NO: 4769 - protein, 5 aa, synthetic construct
DGSPH

SEQ ID NO: 4770 - protein, 5 aa, synthetic construct
LGSPH

SEQ ID NO: 4771 - protein, 5 aa, synthetic construct
AGSPH

SEQ ID NO: 4772 - protein, 5 aa, synthetic construct
EGSPH

SEQ ID NO: 4773 - protein, 5 aa, synthetic construct
SASPH

SEQ ID NO: 4774 - protein, 5 aa, synthetic construct
YDSPH

SEQ ID NO: 4775 - protein, 5 aa, synthetic construct
HGSPH

SEQ ID NO: 4776 - protein, 5 aa, synthetic construct
RDSPH

SEQ ID NO: 4777 - protein, 5 aa, synthetic construct
NDSPH

SEQ ID NO: 4778 - protein, 5 aa, synthetic construct
PDSPH

SEQ ID NO: 4779 - protein, 5 aa, synthetic construct
MGSPH

SEQ ID NO: 4780 - protein, 5 aa, synthetic construct
QVSPH

SEQ ID NO: 4781 - protein, 5 aa, synthetic construct
HNSPH

SEQ ID NO: 4782 - protein, 5 aa, synthetic construct
HPSPH

SEQ ID NO: 4783 - protein, 5 aa, synthetic construct
HSSPH

SEQ ID NO: 4784 - protein, 6 aa, synthetic construct
GHDSPH

SEQ ID NO: 4785 - protein, 6 aa, synthetic construct
GQDSPH

SEQ ID NO: 4786 - protein, 6 aa, synthetic construct
VSGSPH

SEQ ID NO: 4787 - protein, 6 aa, synthetic construct
CSGSPH

SEQ ID NO: 4788 - protein, 6 aa, synthetic construct
GRGSPH

SEQ ID NO: 4789 - protein, 6 aa, synthetic construct
CSHSPH

SEQ ID NO: 4790 - protein, 6 aa, synthetic construct
GQSSPH

SEQ ID NO: 4791 - protein, 6 aa, synthetic construct
GSHSPH

SEQ ID NO: 4792 - protein, 6 aa, synthetic construct
GDDSPH

SEQ ID NO: 4793 - protein, 6 aa, synthetic construct
GHESPH

SEQ ID NO: 4794 - protein, 6 aa, synthetic construct
GNYSPH

SEQ ID NO: 4795 - protein, 6 aa, synthetic construct
RVGSPH

SEQ ID NO: 4796 - protein, 6 aa, synthetic construct
GSCSPH

SEQ ID NO: 4797 - protein, 6 aa, synthetic construct
GLLSPH

SEQ ID NO: 4798 - protein, 6 aa, synthetic construct
MSGSPH

SEQ ID NO: 4799 - protein, 6 aa, synthetic construct
RNGSPH

SEQ ID NO: 4800 - protein, 6 aa, synthetic construct
TSGSPH

SEQ ID NO: 4801 - protein, 6 aa, synthetic construct
ISGSPH

SEQ ID NO: 4802 - protein, 6 aa, synthetic construct
GPGSPH

SEQ ID NO: 4803 - protein, 6 aa, synthetic construct
ESGSPH

SEQ ID NO: 4804 - protein, 6 aa, synthetic construct
SSGSPH

SEQ ID NO: 4805 - protein, 6 aa, synthetic construct
GNGSPH

SEQ ID NO: 4806 - protein, 6 aa, synthetic construct
ASGSPH

SEQ ID NO: 4807 - protein, 6 aa, synthetic construct
NSGSPH

SEQ ID NO: 4808 - protein, 6 aa, synthetic construct
LSGSPH

SEQ ID NO: 4809 - protein, 6 aa, synthetic construct
GGGSPH

SEQ ID NO: 4810 - protein, 6 aa, synthetic construct
KSGSPH

SEQ ID NO: 4811 - protein, 6 aa, synthetic construct
HSGSPH

SEQ ID NO: 4812 - protein, 6 aa, synthetic construct
GTGSPH

SEQ ID NO: 4813 - protein, 6 aa, synthetic construct
PSGSPH

SEQ ID NO: 4814 - protein, 6 aa, synthetic construct
GSVSPH

SEQ ID NO: 4815 - protein, 6 aa, synthetic construct
RSGSPH

SEQ ID NO: 4816 - protein, 6 aa, synthetic construct
GIGSPH

SEQ ID NO: 4817 - protein, 6 aa, synthetic construct
WSGSPH

SEQ ID NO: 4818 - protein, 6 aa, synthetic construct
DSGSPH

SEQ ID NO: 4819 - protein, 6 aa, synthetic construct
IDGSPH

SEQ ID NO: 4820 - protein, 6 aa, synthetic construct
GLGSPH

SEQ ID NO: 4821 - protein, 6 aa, synthetic construct
DAGSPH

SEQ ID NO: 4822 - protein, 6 aa, synthetic construct
DGGSPH

SEQ ID NO: 4823 - protein, 6 aa, synthetic construct
MEGSPH

SEQ ID NO: 4824 - protein, 6 aa, synthetic construct
ENGSPH

SEQ ID NO: 4825 - protein, 6 aa, synthetic construct
GSASPH

SEQ ID NO: 4826 - protein, 6 aa, synthetic construct
KNGSPH

SEQ ID NO: 4827 - protein, 6 aa, synthetic construct
KEGSPH

SEQ ID NO: 4828 - protein, 6 aa, synthetic construct
AIGSPH

SEQ ID NO: 4829 - protein, 6 aa, synthetic construct
GYDSPH

SEQ ID NO: 4830 - protein, 6 aa, synthetic construct
GHGSPH

SEQ ID NO: 4831 - protein, 6 aa, synthetic construct
GRDSPH

SEQ ID NO: 4832 - protein, 6 aa, synthetic construct
GNDSPH

SEQ ID NO: 4833 - protein, 6 aa, synthetic construct
GPDSPH

SEQ ID NO: 4834 - protein, 6 aa, synthetic construct
GMGSPH

SEQ ID NO: 4835 - protein, 6 aa, synthetic construct
GQVSPH

SEQ ID NO: 4836 - protein, 6 aa, synthetic construct
GHNSPH

SEQ ID NO: 4837 - protein, 6 aa, synthetic construct
GHPSPH

SEQ ID NO: 4838 - protein, 6 aa, synthetic construct
GHSSPH

SEQ ID NO: 4839 - protein, 7 aa, synthetic construct
SGSPHSK

SEQ ID NO: 4840 - protein, 7 aa, synthetic construct
HDSPHKS

SEQ ID NO: 4841 - protein, 7 aa, synthetic construct
SGSPHAR

SEQ ID NO: 4842 - protein, 7 aa, synthetic construct
SGSPHVK

SEQ ID NO: 4843 - protein, 7 aa, synthetic construct
QDSPHKS

SEQ ID NO: 4844 - protein, 7 aa, synthetic construct
SGSPHKK

SEQ ID NO: 4845 - protein, 7 aa, synthetic construct
SGSPHVR

SEQ ID NO: 4846 - protein, 7 aa, synthetic construct
SGSPHAS

SEQ ID NO: 4847 - protein, 7 aa, synthetic construct
SGSPHRK

SEQ ID NO: 4848 - protein, 7 aa, synthetic construct
SGSPHKT

SEQ ID NO: 4849 - protein, 7 aa, synthetic construct
SHSPHKS

SEQ ID NO: 4850 - protein, 7 aa, synthetic construct
QSSPHRS

SEQ ID NO: 4851 - protein, 7 aa, synthetic construct
RGSPHAS

SEQ ID NO: 4852 - protein, 7 aa, synthetic construct
RGSPHSK

SEQ ID NO: 4853 - protein, 7 aa, synthetic construct
SGSPHKF

SEQ ID NO: 4854 - protein, 7 aa, synthetic construct
SGSPHKI

SEQ ID NO: 4855 - protein, 7 aa, synthetic construct
SGSPHKL

SEQ ID NO: 4856 - protein, 7 aa, synthetic construct
SGSPHKY

SEQ ID NO: 4857 - protein, 7 aa, synthetic construct
SGSPHTR

SEQ ID NO: 4858 - protein, 7 aa, synthetic construct
SHSPHKR

SEQ ID NO: 4859 - protein, 7 aa, synthetic construct
SGSPHGA

SEQ ID NO: 4860 - protein, 7 aa, synthetic construct
HDSPHKR

SEQ ID NO: 4861 - protein, 7 aa, synthetic construct
DDSPHKS

SEQ ID NO: 4862 - protein, 7 aa, synthetic construct
HESPHKS

SEQ ID NO: 4863 - protein, 7 aa, synthetic construct
NYSPHKI

SEQ ID NO: 4864 - protein, 7 aa, synthetic construct
SGSPHSR

SEQ ID NO: 4865 - protein, 7 aa, synthetic construct
SGSPHSL

SEQ ID NO: 4866 - protein, 7 aa, synthetic construct
SGSPHSS

SEQ ID NO: 4867 - protein, 7 aa, synthetic construct
VGSPHSK

SEQ ID NO: 4868 - protein, 7 aa, synthetic construct
SCSPHRK

SEQ ID NO: 4869 - protein, 7 aa, synthetic construct
SGSPHFL

SEQ ID NO: 4870 - protein, 7 aa, synthetic construct
LLSPHWK

SEQ ID NO: 4871 - protein, 7 aa, synthetic construct
NGSPHSK

SEQ ID NO: 4872 - protein, 7 aa, synthetic construct
PGSPHSK

SEQ ID NO: 4873 - protein, 7 aa, synthetic construct
GGSPHSK

SEQ ID NO: 4874 - protein, 7 aa, synthetic construct
TGSPHSK

SEQ ID NO: 4875 - protein, 7 aa, synthetic construct
SVSPHGK

SEQ ID NO: 4876 - protein, 7 aa, synthetic construct
SGSPHTK

SEQ ID NO: 4877 - protein, 7 aa, synthetic construct
IGSPHSK

SEQ ID NO: 4878 - protein, 7 aa, synthetic construct
DGSPHSK

SEQ ID NO: 4879 - protein, 7 aa, synthetic construct
SGSPHNK

SEQ ID NO: 4880 - protein, 7 aa, synthetic construct
LGSPHSK

SEQ ID NO: 4881 - protein, 7 aa, synthetic construct
AGSPHSK

SEQ ID NO: 4882 - protein, 7 aa, synthetic construct
EGSPHSK

SEQ ID NO: 4883 - protein, 7 aa, synthetic construct
SASPHSK

SEQ ID NO: 4884 - protein, 7 aa, synthetic construct
SGSPHAK

SEQ ID NO: 4885 - protein, 7 aa, synthetic construct
HDSPHKI

SEQ ID NO: 4886 - protein, 7 aa, synthetic construct
YDSPHKS

SEQ ID NO: 4887 - protein, 7 aa, synthetic construct
HDSPHKT

SEQ ID NO: 4888 - protein, 7 aa, synthetic construct
RGSPHKR

SEQ ID NO: 4889 - protein, 7 aa, synthetic construct
HGSPHSK

SEQ ID NO: 4890 - protein, 7 aa, synthetic construct
RDSPHKS

SEQ ID NO: 4891 - protein, 7 aa, synthetic construct
NDSPHKS

SEQ ID NO: 4892 - protein, 7 aa, synthetic construct
QDSPHKI

SEQ ID NO: 4893 - protein, 7 aa, synthetic construct
PDSPHKI

SEQ ID NO: 4894 - protein, 7 aa, synthetic construct
PDSPHKS

SEQ ID NO: 4895 - protein, 7 aa, synthetic construct
MGSPHSK

SEQ ID NO: 4896 - protein, 7 aa, synthetic construct
HDSPHKH

SEQ ID NO: 4897 - protein, 7 aa, synthetic construct
QVSPHKS

SEQ ID NO: 4898 - protein, 7 aa, synthetic construct
HNSPHKS

SEQ ID NO: 4899 - protein, 7 aa, synthetic construct
NGSPHKR

SEQ ID NO: 4900 - protein, 7 aa, synthetic construct
HDSPHKY

SEQ ID NO: 4901 - protein, 7 aa, synthetic construct
NDSPHKI

SEQ ID NO: 4902 - protein, 7 aa, synthetic construct
HDSPHKL

SEQ ID NO: 4903 - protein, 7 aa, synthetic construct
HPSPHWK

SEQ ID NO: 4904 - protein, 7 aa, synthetic construct
HDSPHKM

SEQ ID NO: 4905 - protein, 7 aa, synthetic construct
HSSPHRS

SEQ ID NO: 4906 - protein, 9 aa, synthetic construct
GSGSPHARM

SEQ ID NO: 4907 - protein, 9 aa, synthetic construct
GSGSPHVKS

SEQ ID NO: 4908 - protein, 9 aa, synthetic construct
GQDSPHKSG

SEQ ID NO: 4909 - protein, 9 aa, synthetic construct
GSGSPHASR

SEQ ID NO: 4910 - protein, 9 aa, synthetic construct
GSGSPHVKI

SEQ ID NO: 4911 - protein, 9 aa, synthetic construct
GSGSPHKKN

SEQ ID NO: 4912 - protein, 9 aa, synthetic construct
GSGSPHVRM

SEQ ID NO: 4913 - protein, 9 aa, synthetic construct
VSGSPHSKA

SEQ ID NO: 4914 - protein, 9 aa, synthetic construct
CSGSPHSKA

SEQ ID NO: 4915 - protein, 9 aa, synthetic construct
GSGSPHRKA

SEQ ID NO: 4916 - protein, 9 aa, synthetic construct
CSGSPHKTS

SEQ ID NO: 4917 - protein, 9 aa, synthetic construct
CSHSPHKSG

SEQ ID NO: 4918 - protein, 9 aa, synthetic construct
GQSSPHRSG

SEQ ID NO: 4919 - protein, 9 aa, synthetic construct
GRGSPHASR

SEQ ID NO: 4920 - protein, 9 aa, synthetic construct
GRGSPHSKA

SEQ ID NO: 4921 - protein, 9 aa, synthetic construct
GSGSPHKFG

SEQ ID NO: 4922 - protein, 9 aa, synthetic construct
GSGSPHKIG

SEQ ID NO: 4923 - protein, 9 aa, synthetic construct
GSGSPHKLG

SEQ ID NO: 4924 - protein, 9 aa, synthetic construct
GSGSPHKTS

SEQ ID NO: 4925 - protein, 9 aa, synthetic construct
GSGSPHKTT

SEQ ID NO: 4926 - protein, 9 aa, synthetic construct
GSGSPHKTY

SEQ ID NO: 4927 - protein, 9 aa, synthetic construct
GSGSPHKYG

SEQ ID NO: 4928 - protein, 9 aa, synthetic construct
GSGSPHSKD

SEQ ID NO: 4929 - protein, 9 aa, synthetic construct
GSGSPHSKP

SEQ ID NO: 4930 - protein, 9 aa, synthetic construct
GSGSPHTRG

SEQ ID NO: 4931 - protein, 9 aa, synthetic construct
GSGSPHVRG

SEQ ID NO: 4932 - protein, 9 aa, synthetic construct
GSHSPHKRG

SEQ ID NO: 4933 - protein, 9 aa, synthetic construct
GSHSPHKSG

SEQ ID NO: 4934 - protein, 9 aa, synthetic construct
VSGSPHASR

SEQ ID NO: 4935 - protein, 9 aa, synthetic construct
VSGSPHGAR

SEQ ID NO: 4936 - protein, 9 aa, synthetic construct
VSGSPHKFG

SEQ ID NO: 4937 - protein, 9 aa, synthetic construct
GHDSPHKRG

SEQ ID NO: 4938 - protein, 9 aa, synthetic construct
GDDSPHKSG

SEQ ID NO: 4939 - protein, 9 aa, synthetic construct
GHESPHKSA

SEQ ID NO: 4940 - protein, 9 aa, synthetic construct
GHDSPHKSA

SEQ ID NO: 4941 - protein, 9 aa, synthetic construct
GNYSPHKIG

SEQ ID NO: 4942 - protein, 9 aa, synthetic construct
GHDSPHKSR

SEQ ID NO: 4943 - protein, 9 aa, synthetic construct
GSGSPHSKL

SEQ ID NO: 4944 - protein, 9 aa, synthetic construct
GSGSPHSRA

SEQ ID NO: 4945 - protein, 9 aa, synthetic construct
GSGSPHSKR

SEQ ID NO: 4946 - protein, 9 aa, synthetic construct
GSGSPHSLR

SEQ ID NO: 4947 - protein, 9 aa, synthetic construct
GSGSPHSRG

SEQ ID NO: 4948 - protein, 9 aa, synthetic construct
GSGSPHSSR

SEQ ID NO: 4949 - protein, 9 aa, synthetic construct
RVGSPHSKA

SEQ ID NO: 4950 - protein, 9 aa, synthetic construct
GSCSPHRKA

SEQ ID NO: 4951 - protein, 9 aa, synthetic construct
GSGSPHFLR

SEQ ID NO: 4952 - protein, 9 aa, synthetic construct
GSGSPHSKW

SEQ ID NO: 4953 - protein, 9 aa, synthetic construct
GSGSPHSKS

SEQ ID NO: 4954 - protein, 9 aa, synthetic construct
GLLSPHWKA

SEQ ID NO: 4955 - protein, 9 aa, synthetic construct
GSGSPHVRR

SEQ ID NO: 4956 - protein, 9 aa, synthetic construct
GSGSPHSKV

SEQ ID NO: 4957 - protein, 9 aa, synthetic construct
MSGSPHSKA

SEQ ID NO: 4958 - protein, 9 aa, synthetic construct
RNGSPHSKA

SEQ ID NO: 4959 - protein, 9 aa, synthetic construct
TSGSPHSKA

SEQ ID NO: 4960 - protein, 9 aa, synthetic construct
ISGSPHSKA

SEQ ID NO: 4961 - protein, 9 aa, synthetic construct
GPGSPHSKA

SEQ ID NO: 4962 - protein, 9 aa, synthetic construct
GSGSPHSKT

SEQ ID NO: 4963 - protein, 9 aa, synthetic construct
ESGSPHSKA

SEQ ID NO: 4964 - protein, 9 aa, synthetic construct
SSGSPHSKA

SEQ ID NO: 4965 - protein, 9 aa, synthetic construct
GNGSPHSKA

SEQ ID NO: 4966 - protein, 9 aa, synthetic construct
ASGSPHSKA

SEQ ID NO: 4967 - protein, 9 aa, synthetic construct
NSGSPHSKA

SEQ ID NO: 4968 - protein, 9 aa, synthetic construct
LSGSPHSKA

SEQ ID NO: 4969 - protein, 9 aa, synthetic construct
GGGSPHSKA

SEQ ID NO: 4970 - protein, 9 aa, synthetic construct
KSGSPHSKA

SEQ ID NO: 4971 - protein, 9 aa, synthetic construct
GGGSPHSKS

SEQ ID NO: 4972 - protein, 9 aa, synthetic construct
GSGSPHSKG

SEQ ID NO: 4973 - protein, 9 aa, synthetic construct
HSGSPHSKA

SEQ ID NO: 4974 - protein, 9 aa, synthetic construct
GTGSPHSKA

SEQ ID NO: 4975 - protein, 9 aa, synthetic construct
PSGSPHSKA

SEQ ID NO: 4976 - protein, 9 aa, synthetic construct
GSVSPHGKA

SEQ ID NO: 4977 - protein, 9 aa, synthetic construct
RSGSPHSKA

SEQ ID NO: 4978 - protein, 9 aa, synthetic construct
GSGSPHTKA

SEQ ID NO: 4979 - protein, 9 aa, synthetic construct
GIGSPHSKA

SEQ ID NO: 4980 - protein, 9 aa, synthetic construct
WSGSPHSKA

SEQ ID NO: 4981 - protein, 9 aa, synthetic construct
DSGSPHSKA

SEQ ID NO: 4982 - protein, 9 aa, synthetic construct
IDGSPHSKA

SEQ ID NO: 4983 - protein, 9 aa, synthetic construct
GSGSPHNKA

SEQ ID NO: 4984 - protein, 9 aa, synthetic construct
GLGSPHSKS

SEQ ID NO: 4985 - protein, 9 aa, synthetic construct
DAGSPHSKA

SEQ ID NO: 4986 - protein, 9 aa, synthetic construct
DGGSPHSKA

SEQ ID NO: 4987 - protein, 9 aa, synthetic construct
MEGSPHSKA

SEQ ID NO: 4988 - protein, 9 aa, synthetic construct
ENGSPHSKA

SEQ ID NO: 4989 - protein, 9 aa, synthetic construct
GSASPHSKA

SEQ ID NO: 4990 - protein, 9 aa, synthetic construct
GNGSPHSKS

SEQ ID NO: 4991 - protein, 9 aa, synthetic construct
KNGSPHSKA

SEQ ID NO: 4992 - protein, 9 aa, synthetic construct
KEGSPHSKA

SEQ ID NO: 4993 - protein, 9 aa, synthetic construct
AIGSPHSKA

SEQ ID NO: 4994 - protein, 9 aa, synthetic construct
GSGSPHSKN

SEQ ID NO: 4995 - protein, 9 aa, synthetic construct
GSGSPHAKA

SEQ ID NO: 4996 - protein, 9 aa, synthetic construct
GHDSPHKIG

SEQ ID NO: 4997 - protein, 9 aa, synthetic construct
GYDSPHKSG

SEQ ID NO: 4998 - protein, 9 aa, synthetic construct
GHESPHKSG

SEQ ID NO: 4999 - protein, 9 aa, synthetic construct
GHDSPHKTG

SEQ ID NO: 5000 - protein, 9 aa, synthetic construct
GRGSPHKRG

SEQ ID NO: 5001 - protein, 9 aa, synthetic construct
GHDSPHKSL

SEQ ID NO: 5002 - protein, 9 aa, synthetic construct
GHGSPHSKA

SEQ ID NO: 5003 - protein, 9 aa, synthetic construct
GHDSPHKSE

SEQ ID NO: 5004 - protein, 9 aa, synthetic construct
GRDSPHKSG

SEQ ID NO: 5005 - protein, 9 aa, synthetic construct
GNDSPHKSV

SEQ ID NO: 5006 - protein, 9 aa, synthetic construct
GQDSPHKIG

SEQ ID NO: 5007 - protein, 9 aa, synthetic construct
GHDSPHKSV

SEQ ID NO: 5008 - protein, 9 aa, synthetic construct
GPDSPHKIG

SEQ ID NO: 5009 - protein, 9 aa, synthetic construct
GPDSPHKSG

SEQ ID NO: 5010 - protein, 9 aa, synthetic construct
GHDSPHKSW

SEQ ID NO: 5011 - protein, 9 aa, synthetic construct
GHDSPHKSN

SEQ ID NO: 5012 - protein, 9 aa, synthetic construct
GMGSPHSKT

SEQ ID NO: 5013 - protein, 9 aa, synthetic construct
GHDSPHKHG

SEQ ID NO: 5014 - protein, 9 aa, synthetic construct
GQVSPHKSG

SEQ ID NO: 5015 - protein, 9 aa, synthetic construct
GDDSPHKSV

SEQ ID NO: 5016 - protein, 9 aa, synthetic construct
GHNSPHKSG

SEQ ID NO: 5017 - protein, 9 aa, synthetic construct
GNGSPHKRG

SEQ ID NO: 5018 - protein, 9 aa, synthetic construct
GHDSPHKYG

SEQ ID NO: 5019 - protein, 9 aa, synthetic construct
GHDSPHKSQ

SEQ ID NO: 5020 - protein, 9 aa, synthetic construct
GNDSPHKIG

SEQ ID NO: 5021 - protein, 9 aa, synthetic construct
GHDSPHKSK

SEQ ID NO: 5022 - protein, 9 aa, synthetic construct
GHDSPHKLW

SEQ ID NO: 5023 - protein, 9 aa, synthetic construct
GHPSPHWKG

SEQ ID NO: 5024 - protein, 9 aa, synthetic construct
GHDSPHKMG

SEQ ID NO: 5025 - protein, 9 aa, synthetic construct
GHDSPHKMA

SEQ ID NO: 5026 - protein, 9 aa, synthetic construct
GHSSPHRSG

SEQ ID NO: 5027 - protein, 8 aa, synthetic construct
SGSPHKYG

SEQ ID NO: 5028 - protein, 4 aa, synthetic construct
QNQQ

SEQ ID NO: 5029 - protein, 4 aa, synthetic construct
WNQQ

SEQ ID NO: 5030 - protein, 4 aa, synthetic construct
QYYV

SEQ ID NO: 5031 - protein, 4 aa, synthetic construct
RRQQ

SEQ ID NO: 5032 - protein, 4 aa, synthetic construct
GCGQ

SEQ ID NO: 5033 - protein, 4 aa, synthetic construct
LRQQ

SEQ ID NO: 5034 - protein, 4 aa, synthetic construct
RNQQ

SEQ ID NO: 5035 - protein, 4 aa, synthetic construct
VNQQ

SEQ ID NO: 5036 - protein, 4 aa, synthetic construct
FRLQ

SEQ ID NO: 5037 - protein, 4 aa, synthetic construct
FNQQ

SEQ ID NO: 5038 - protein, 4 aa, synthetic construct
LLQQ

SEQ ID NO: 5039 - protein, 4 aa, synthetic construct
SNQQ

SEQ ID NO: 5040 - protein, 4 aa, synthetic construct
RLQQ

SEQ ID NO: 5041 - protein, 4 aa, synthetic construct
LNQQ

SEQ ID NO: 5042 - protein, 4 aa, synthetic construct
QRKL

SEQ ID NO: 5043 - protein, 4 aa, synthetic construct
LRRQ

SEQ ID NO: 5044 - protein, 4 aa, synthetic construct
QRLR

SEQ ID NO: 5045 - protein, 4 aa, synthetic construct
QRRL

SEQ ID NO: 5046 - protein, 4 aa, synthetic construct
RRLQ

SEQ ID NO: 5047 - protein, 4 aa, synthetic construct
RLRQ

SEQ ID NO: 5048 - protein, 4 aa, synthetic construct
SKRQ

SEQ ID NO: 5049 - protein, 4 aa, synthetic construct
QLYR

SEQ ID NO: 5050 - protein, 4 aa, synthetic construct
QLTV

SEQ ID NO: 5051 - protein, 4 aa, synthetic construct
QNKQ

SEQ ID NO: 5052 - protein, 4 aa, synthetic construct
KNQQ

SEQ ID NO: 5053 - protein, 4 aa, synthetic construct
QKQQ

SEQ ID NO: 5054 - protein, 4 aa, synthetic construct
QTQQ

SEQ ID NO: 5055 - protein, 4 aa, synthetic construct
QNHQ

SEQ ID NO: 5056 - protein, 4 aa, synthetic construct
QHQQ

SEQ ID NO: 5057 - protein, 4 aa, synthetic construct
QNQH

SEQ ID NO: 5058 - protein, 4 aa, synthetic construct
QHRQ

SEQ ID NO: 5059 - protein, 4 aa, synthetic construct
LTQQ

SEQ ID NO: 5060 - protein, 4 aa, synthetic construct
QNQW

SEQ ID NO: 5061 - protein, 4 aa, synthetic construct
QNTH

SEQ ID NO: 5062 - protein, 4 aa, synthetic construct
RRRQ

SEQ ID NO: 5063 - protein, 4 aa, synthetic construct
QYQQ

SEQ ID NO: 5064 - protein, 4 aa, synthetic construct
QNDQ

SEQ ID NO: 5065 - protein, 4 aa, synthetic construct
QNRH

SEQ ID NO: 5066 - protein, 4 aa, synthetic construct
RDQQ

SEQ ID NO: 5067 - protein, 4 aa, synthetic construct
PNLQ

SEQ ID NO: 5068 - protein, 4 aa, synthetic construct
HVRQ

SEQ ID NO: 5069 - protein, 4 aa, synthetic construct
PNQH

SEQ ID NO: 5070 - protein, 4 aa, synthetic construct
HNQQ

SEQ ID NO: 5071 - protein, 4 aa, synthetic construct
QSQQ

SEQ ID NO: 5072 - protein, 4 aa, synthetic construct
QPAK

SEQ ID NO: 5073 - protein, 4 aa, synthetic construct
QNLA

SEQ ID NO: 5074 - protein, 4 aa, synthetic construct
QNQL

SEQ ID NO: 5075 - protein, 4 aa, synthetic construct
QGQQ

SEQ ID NO: 5076 - protein, 4 aa, synthetic construct
LNRQ

SEQ ID NO: 5077 - protein, 4 aa, synthetic construct
QNPP

SEQ ID NO: 5078 - protein, 4 aa, synthetic construct
QNLQ

SEQ ID NO: 5079 - protein, 4 aa, synthetic construct
QDQE

SEQ ID NO: 5080 - protein, 4 aa, synthetic construct
QDQQ

SEQ ID NO: 5081 - protein, 4 aa, synthetic construct
HWQQ

SEQ ID NO: 5082 - protein, 4 aa, synthetic construct
PNQQ

SEQ ID NO: 5083 - protein, 4 aa, synthetic construct
PEQQ

SEQ ID NO: 5084 - protein, 4 aa, synthetic construct
QRTM

SEQ ID NO: 5085 - protein, 4 aa, synthetic construct
LHQH

SEQ ID NO: 5086 - protein, 4 aa, synthetic construct
QHRI

SEQ ID NO: 5087 - protein, 4 aa, synthetic construct
QYIH

SEQ ID NO: 5088 - protein, 4 aa, synthetic construct
QKFE

SEQ ID NO: 5089 - protein, 4 aa, synthetic construct
QFPS

SEQ ID NO: 5090 - protein, 4 aa, synthetic construct
QNPL

SEQ ID NO: 5091 - protein, 4 aa, synthetic construct
QAIK

SEQ ID NO: 5092 - protein, 4 aa, synthetic construct
QNRQ

SEQ ID NO: 5093 - protein, 4 aa, synthetic construct
QYQH

SEQ ID NO: 5094 - protein, 4 aa, synthetic construct
QNPQ

SEQ ID NO: 5095 - protein, 4 aa, synthetic construct
QHQL

SEQ ID NO: 5096 - protein, 4 aa, synthetic construct
QSPP

SEQ ID NO: 5097 - protein, 4 aa, synthetic construct
QAKL

SEQ ID NO: 5098 - protein, 4 aa, synthetic construct
KSQQ

SEQ ID NO: 5099 - protein, 4 aa, synthetic construct
QDRP

SEQ ID NO: 5100 - protein, 4 aa, synthetic construct
QNLG

SEQ ID NO: 5101 - protein, 4 aa, synthetic construct
QAFH

SEQ ID NO: 5102 - protein, 4 aa, synthetic construct
QNAQ

SEQ ID NO: 5103 - protein, 4 aa, synthetic construct
HNQL

SEQ ID NO: 5104 - protein, 4 aa, synthetic construct
QKLN

SEQ ID NO: 5105 - protein, 4 aa, synthetic construct
QNVQ

SEQ ID NO: 5106 - protein, 4 aa, synthetic construct
QAQQ

SEQ ID NO: 5107 - protein, 4 aa, synthetic construct
QTPP

SEQ ID NO: 5108 - protein, 4 aa, synthetic construct
QPPA

SEQ ID NO: 5109 - protein, 4 aa, synthetic construct
QERP

SEQ ID NO: 5110 - protein, 4 aa, synthetic construct
QDLQ

SEQ ID NO: 5111 - protein, 4 aa, synthetic construct
QAMH

SEQ ID NO: 5112 - protein, 4 aa, synthetic construct
QHPS

SEQ ID NO: 5113 - protein, 4 aa, synthetic construct
PGLQ

SEQ ID NO: 5114 - protein, 4 aa, synthetic construct
QGIR

SEQ ID NO: 5115 - protein, 4 aa, synthetic construct
QAPA

SEQ ID NO: 5116 - protein, 4 aa, synthetic construct
QIPP

SEQ ID NO: 5117 - protein, 4 aa, synthetic construct
QTQL

SEQ ID NO: 5118 - protein, 4 aa, synthetic construct
QAPS

SEQ ID NO: 5119 - protein, 4 aa, synthetic construct
QNTY

SEQ ID NO: 5120 - protein, 4 aa, synthetic construct
QDKQ

SEQ ID NO: 5121 - protein, 4 aa, synthetic construct
QNHL

SEQ ID NO: 5122 - protein, 4 aa, synthetic construct
QIGM

SEQ ID NO: 5123 - protein, 4 aa, synthetic construct
LNKQ

SEQ ID NO: 5124 - protein, 4 aa, synthetic construct
PNQL

SEQ ID NO: 5125 - protein, 4 aa, synthetic construct
QLQQ

SEQ ID NO: 5126 - protein, 4 aa, synthetic construct
QRMS

SEQ ID NO: 5127 - protein, 4 aa, synthetic construct
QGIL

SEQ ID NO: 5128 - protein, 4 aa, synthetic construct
QDRQ

SEQ ID NO: 5129 - protein, 4 aa, synthetic construct
RDWQ

SEQ ID NO: 5130 - protein, 4 aa, synthetic construct
QERS

SEQ ID NO: 5131 - protein, 4 aa, synthetic construct
QNYQ

SEQ ID NO: 5132 - protein, 4 aa, synthetic construct
QRTC

SEQ ID NO: 5133 - protein, 4 aa, synthetic construct
QIGH

SEQ ID NO: 5134 - protein, 4 aa, synthetic construct
QGAI

SEQ ID NO: 5135 - protein, 4 aa, synthetic construct
QVPP

SEQ ID NO: 5136 - protein, 4 aa, synthetic construct
QVQQ

SEQ ID NO: 5137 - protein, 4 aa, synthetic construct
LMRQ

SEQ ID NO: 5138 - protein, 4 aa, synthetic construct
QYSV

SEQ ID NO: 5139 - protein, 4 aa, synthetic construct
QAIT

SEQ ID NO: 5140 - protein, 4 aa, synthetic construct
QKTL

SEQ ID NO: 5141 - protein, 4 aa, synthetic construct
QLHH

SEQ ID NO: 5142 - protein, 4 aa, synthetic construct
QNII

SEQ ID NO: 5143 - protein, 4 aa, synthetic construct
QGHH

SEQ ID NO: 5144 - protein, 4 aa, synthetic construct
QSKV

SEQ ID NO: 5145 - protein, 4 aa, synthetic construct
QLPS

SEQ ID NO: 5146 - protein, 4 aa, synthetic construct
IGKQ

SEQ ID NO: 5147 - protein, 4 aa, synthetic construct
QAIH

SEQ ID NO: 5148 - protein, 4 aa, synthetic construct
QHGL

SEQ ID NO: 5149 - protein, 4 aa, synthetic construct
QFMC

SEQ ID NO: 5150 - protein, 4 aa, synthetic construct
QNQM

SEQ ID NO: 5151 - protein, 4 aa, synthetic construct
QHLQ

SEQ ID NO: 5152 - protein, 4 aa, synthetic construct
QPAR

SEQ ID NO: 5153 - protein, 4 aa, synthetic construct
QSLQ

SEQ ID NO: 5154 - protein, 4 aa, synthetic construct
QSQL

SEQ ID NO: 5155 - protein, 4 aa, synthetic construct
HSQQ

SEQ ID NO: 5156 - protein, 4 aa, synthetic construct
QMPS

SEQ ID NO: 5157 - protein, 4 aa, synthetic construct
QGSL

SEQ ID NO: 5158 - protein, 4 aa, synthetic construct
QVPA

SEQ ID NO: 5159 - protein, 4 aa, synthetic construct
HYQQ

SEQ ID NO: 5160 - protein, 4 aa, synthetic construct
QVPS

SEQ ID NO: 5161 - protein, 4 aa, synthetic construct
RGEQ

SEQ ID NO: 5162 - protein, 4 aa, synthetic construct
PGQQ

SEQ ID NO: 5163 - protein, 4 aa, synthetic construct
LEQQ

SEQ ID NO: 5164 - protein, 4 aa, synthetic construct
QNQS

SEQ ID NO: 5165 - protein, 4 aa, synthetic construct
QKVI

SEQ ID NO: 5166 - protein, 4 aa, synthetic construct
QNND

SEQ ID NO: 5167 - protein, 4 aa, synthetic construct
QSVH

SEQ ID NO: 5168 - protein, 4 aa, synthetic construct
QPLG

SEQ ID NO: 5169 - protein, 4 aa, synthetic construct
HNQE

SEQ ID NO: 5170 - protein, 4 aa, synthetic construct
QIQQ

SEQ ID NO: 5171 - protein, 4 aa, synthetic construct
QVRN

SEQ ID NO: 5172 - protein, 4 aa, synthetic construct
PSNQ

SEQ ID NO: 5173 - protein, 4 aa, synthetic construct
QVGH

SEQ ID NO: 5174 - protein, 4 aa, synthetic construct
QRDI

SEQ ID NO: 5175 - protein, 4 aa, synthetic construct
QMPN

SEQ ID NO: 5176 - protein, 4 aa, synthetic construct
RGLQ

SEQ ID NO: 5177 - protein, 4 aa, synthetic construct
PSLQ

SEQ ID NO: 5178 - protein, 4 aa, synthetic construct
QRDQ

SEQ ID NO: 5179 - protein, 4 aa, synthetic construct
QAKG

SEQ ID NO: 5180 - protein, 4 aa, synthetic construct
QSAH

SEQ ID NO: 5181 - protein, 4 aa, synthetic construct
QSTM

SEQ ID NO: 5182 - protein, 4 aa, synthetic construct
QREM

SEQ ID NO: 5183 - protein, 4 aa, synthetic construct
QYRA

SEQ ID NO: 5184 - protein, 4 aa, synthetic construct
QRQQ

SEQ ID NO: 5185 - protein, 4 aa, synthetic construct
QWQQ

SEQ ID NO: 5186 - protein, 4 aa, synthetic construct
QRMN

SEQ ID NO: 5187 - protein, 4 aa, synthetic construct
GDSQ

SEQ ID NO: 5188 - protein, 4 aa, synthetic construct
QKIS

SEQ ID NO: 5189 - protein, 4 aa, synthetic construct
PSMQ

SEQ ID NO: 5190 - protein, 4 aa, synthetic construct
SPRQ

SEQ ID NO: 5191 - protein, 4 aa, synthetic construct
MEQQ

SEQ ID NO: 5192 - protein, 4 aa, synthetic construct
QYQN

SEQ ID NO: 5193 - protein, 4 aa, synthetic construct
QIRQ

SEQ ID NO: 5194 - protein, 4 aa, synthetic construct
QSVQ

SEQ ID NO: 5195 - protein, 4 aa, synthetic construct
RSQQ

SEQ ID NO: 5196 - protein, 4 aa, synthetic construct
QNKL

SEQ ID NO: 5197 - protein, 4 aa, synthetic construct
QIQH

SEQ ID NO: 5198 - protein, 4 aa, synthetic construct
PRQQ

SEQ ID NO: 5199 - protein, 4 aa, synthetic construct
HTQQ

SEQ ID NO: 5200 - protein, 4 aa, synthetic construct
QRQH

SEQ ID NO: 5201 - protein, 4 aa, synthetic construct
RNQE

SEQ ID NO: 5202 - protein, 4 aa, synthetic construct
QSKQ

SEQ ID NO: 5203 - protein, 4 aa, synthetic construct
QNQP

SEQ ID NO: 5204 - protein, 4 aa, synthetic construct
QSPQ

SEQ ID NO: 5205 - protein, 4 aa, synthetic construct
QTRQ

SEQ ID NO: 5206 - protein, 4 aa, synthetic construct
QNLH

SEQ ID NO: 5207 - protein, 4 aa, synthetic construct
QNQE

SEQ ID NO: 5208 - protein, 4 aa, synthetic construct
LNQP

SEQ ID NO: 5209 - protein, 4 aa, synthetic construct
QNQD

SEQ ID NO: 5210 - protein, 4 aa, synthetic construct
QNLL

SEQ ID NO: 5211 - protein, 4 aa, synthetic construct
QLVI

SEQ ID NO: 5212 - protein, 4 aa, synthetic construct
RTQE

SEQ ID NO: 5213 - protein, 4 aa, synthetic construct
QTHQ

SEQ ID NO: 5214 - protein, 4 aa, synthetic construct
QDQH

SEQ ID NO: 5215 - protein, 4 aa, synthetic construct
QSQH

SEQ ID NO: 5216 - protein, 4 aa, synthetic construct
VRQQ

SEQ ID NO: 5217 - protein, 4 aa, synthetic construct
AWQQ

SEQ ID NO: 5218 - protein, 4 aa, synthetic construct
QSVP

SEQ ID NO: 5219 - protein, 4 aa, synthetic construct
QNIQ

SEQ ID NO: 5220 - protein, 4 aa, synthetic construct
LDQQ

SEQ ID NO: 5221 - protein, 4 aa, synthetic construct
PDQQ

SEQ ID NO: 5222 - protein, 4 aa, synthetic construct
ESQQ

SEQ ID NO: 5223 - protein, 4 aa, synthetic construct
QRQL

SEQ ID NO: 5224 - protein, 4 aa, synthetic construct
QIIV

SEQ ID NO: 5225 - protein, 4 aa, synthetic construct
QKQS

SEQ ID NO: 5226 - protein, 4 aa, synthetic construct
QSHQ

SEQ ID NO: 5227 - protein, 4 aa, synthetic construct
QFVV

SEQ ID NO: 5228 - protein, 4 aa, synthetic construct
QSQP

SEQ ID NO: 5229 - protein, 4 aa, synthetic construct
QNEQ

SEQ ID NO: 5230 - protein, 4 aa, synthetic construct
INQQ

SEQ ID NO: 5231 - protein, 4 aa, synthetic construct
RNRQ

SEQ ID NO: 5232 - protein, 4 aa, synthetic construct
RDQK

SEQ ID NO: 5233 - protein, 4 aa, synthetic construct
QWKR

SEQ ID NO: 5234 - protein, 4 aa, synthetic construct
ENRQ

SEQ ID NO: 5235 - protein, 4 aa, synthetic construct
QTQP

SEQ ID NO: 5236 - protein, 4 aa, synthetic construct
QKQL

SEQ ID NO: 5237 - protein, 4 aa, synthetic construct
RNQL

SEQ ID NO: 5238 - protein, 4 aa, synthetic construct
ISIQ

SEQ ID NO: 5239 - protein, 4 aa, synthetic construct
QTVC

SEQ ID NO: 5240 - protein, 4 aa, synthetic construct
QQIM

SEQ ID NO: 5241 - protein, 4 aa, synthetic construct
LNHQ

SEQ ID NO: 5242 - protein, 4 aa, synthetic construct
QNQA

SEQ ID NO: 5243 - protein, 4 aa, synthetic construct
QMIH

SEQ ID NO: 5244 - protein, 4 aa, synthetic construct
RNHQ

SEQ ID NO: 5245 - protein, 4 aa, synthetic construct
QKMN

SEQ ID NO: 5246 - protein, 17 aa, synthetic construct
TINGSGSPHKYGQNQQT

SEQ ID NO: 5247 - protein, 7 aa, synthetic construct
SLLWNQQ

SEQ ID NO: 5248 - protein, 7 aa, synthetic construct
SKAQYYV

SEQ ID NO: 5249 - protein, 7 aa, synthetic construct
SKLRRQQ

SEQ ID NO: 5250 - protein, 7 aa, synthetic construct
SIWQNQQ

SEQ ID NO: 5251 - protein, 7 aa, synthetic construct
SKAGCGQ

SEQ ID NO: 5252 - protein, 7 aa, synthetic construct
SRAQNQQ

SEQ ID NO: 5253 - protein, 7 aa, synthetic construct
SKRLRQQ

SEQ ID NO: 5254 - protein, 7 aa, synthetic construct
SLRRNQQ

SEQ ID NO: 5255 - protein, 7 aa, synthetic construct
SRGRNQQ

SEQ ID NO: 5256 - protein, 7 aa, synthetic construct
SEIVNQQ

SEQ ID NO: 5257 - protein, 7 aa, synthetic construct
SSRRNQQ

SEQ ID NO: 5258 - protein, 7 aa, synthetic construct
CLLQNQQ

SEQ ID NO: 5259 - protein, 7 aa, synthetic construct
SKAFRLQ

SEQ ID NO: 5260 - protein, 7 aa, synthetic construct
CLAQNQQ

SEQ ID NO: 5261 - protein, 7 aa, synthetic construct
FLRQNQQ

SEQ ID NO: 5262 - protein, 7 aa, synthetic construct
SLRFNQQ

SEQ ID NO: 5263 - protein, 7 aa, synthetic construct
SYLRNQQ

SEQ ID NO: 5264 - protein, 7 aa, synthetic construct
CSLQNQQ

SEQ ID NO: 5265 - protein, 7 aa, synthetic construct
VLWQNQQ

SEQ ID NO: 5266 - protein, 7 aa, synthetic construct
SKWLLQQ

SEQ ID NO: 5267 - protein, 7 aa, synthetic construct
SLWSNQQ

SEQ ID NO: 5268 - protein, 7 aa, synthetic construct
SKRRLQQ

SEQ ID NO: 5269 - protein, 7 aa, synthetic construct
SVYLNQQ

SEQ ID NO: 5270 - protein, 7 aa, synthetic construct
SLWLNQQ

SEQ ID NO: 5271 - protein, 7 aa, synthetic construct
SKAQRKL

SEQ ID NO: 5272 - protein, 7 aa, synthetic construct
SKALRRQ

SEQ ID NO: 5273 - protein, 7 aa, synthetic construct
SKAQRLR

SEQ ID NO: 5274 - protein, 7 aa, synthetic construct
SKAQNQQ

SEQ ID NO: 5275 - protein, 7 aa, synthetic construct
SKAQRRL

SEQ ID NO: 5276 - protein, 7 aa, synthetic construct
SKARRQQ

SEQ ID NO: 5277 - protein, 7 aa, synthetic construct
SKARRLQ

SEQ ID NO: 5278 - protein, 7 aa, synthetic construct
SKSRRQQ

SEQ ID NO: 5279 - protein, 7 aa, synthetic construct
SKARLRQ

SEQ ID NO: 5280 - protein, 7 aa, synthetic construct
SKASKRQ

SEQ ID NO: 5281 - protein, 7 aa, synthetic construct
VRRQNQQ

SEQ ID NO: 5282 - protein, 7 aa, synthetic construct
SKAQLYR

SEQ ID NO: 5283 - protein, 7 aa, synthetic construct
SLFRNQQ

SEQ ID NO: 5284 - protein, 7 aa, synthetic construct
SKAQLTV

SEQ ID NO: 5285 - protein, 13 aa, synthetic construct
GSGSPHSLLWNQQ

SEQ ID NO: 5286 - protein, 13 aa, synthetic construct
GSGSPHSIWQNQQ

SEQ ID NO: 5287 - protein, 13 aa, synthetic construct
GSGSPHSEIVNQQ

SEQ ID NO: 5288 - protein, 13 aa, synthetic construct
GSGSPHCLLQNQQ

SEQ ID NO: 5289 - protein, 13 aa, synthetic construct
GSGSPHCLAQNQQ

SEQ ID NO: 5290 - protein, 13 aa, synthetic construct
GSGSPHSYLRNQQ

SEQ ID NO: 5291 - protein, 13 aa, synthetic construct
GSGSPHCSLQNQQ

SEQ ID NO: 5292 - protein, 13 aa, synthetic construct
GSGSPHVLWQNQQ

SEQ ID NO: 5293 - protein, 13 aa, synthetic construct
GSGSPHSLWSNQQ

SEQ ID NO: 5294 - protein, 13 aa, synthetic construct
GSGSPHSVYLNQQ

SEQ ID NO: 5295 - protein, 13 aa, synthetic construct
GSGSPHSLWLNQQ

SEQ ID NO: 5296 - protein, 13 aa, synthetic construct
GSGSPHSLFRNQQ

SEQ ID NO: 5297 - protein, 6 aa, synthetic construct
TINGHD

SEQ ID NO: 5298 - protein, 6 aa, synthetic construct
MPEGHD

SEQ ID NO: 5299 - protein, 6 aa, synthetic construct
MEGGHD

SEQ ID NO: 5300 - protein, 6 aa, synthetic construct
MEYGHD

SEQ ID NO: 5301 - protein, 6 aa, synthetic construct
AEWGHD

SEQ ID NO: 5302 - protein, 6 aa, synthetic construct
CEWGHD

SEQ ID NO: 5303 - protein, 6 aa, synthetic construct
ANNGQD

SEQ ID NO: 5304 - protein, 6 aa, synthetic construct
IPEGHD

SEQ ID NO: 5305 - protein, 6 aa, synthetic construct
ADMGHD

SEQ ID NO: 5306 - protein, 6 aa, synthetic construct
IEYGHD

SEQ ID NO: 5307 - protein, 6 aa, synthetic construct
ADYGHD

SEQ ID NO: 5308 - protein, 6 aa, synthetic construct
IETGHD

SEQ ID NO: 5309 - protein, 6 aa, synthetic construct
MEWGHD

SEQ ID NO: 5310 - protein, 6 aa, synthetic construct
CEYGHD

SEQ ID NO: 5311 - protein, 6 aa, synthetic construct
RINGHD

SEQ ID NO: 5312 - protein, 6 aa, synthetic construct
MEIGHD

SEQ ID NO: 5313 - protein, 6 aa, synthetic construct
LEYGHD

SEQ ID NO: 5314 - protein, 6 aa, synthetic construct
ADWGHD

SEQ ID NO: 5315 - protein, 6 aa, synthetic construct
IEIGHD

SEQ ID NO: 5316 - protein, 6 aa, synthetic construct
TIKDND

SEQ ID NO: 5317 - protein, 6 aa, synthetic construct
DIMGHD

SEQ ID NO: 5318 - protein, 6 aa, synthetic construct
FEQGHD

SEQ ID NO: 5319 - protein, 6 aa, synthetic construct
MEFGHD

SEQ ID NO: 5320 - protein, 6 aa, synthetic construct
CDQGHD

SEQ ID NO: 5321 - protein, 6 aa, synthetic construct
LPEGHD

SEQ ID NO: 5322 - protein, 6 aa, synthetic construct
IENGHD

SEQ ID NO: 5323 - protein, 6 aa, synthetic construct
MESGHD

SEQ ID NO: 5324 - protein, 6 aa, synthetic construct
AEIGHD

SEQ ID NO: 5325 - protein, 6 aa, synthetic construct
VEYGHD

SEQ ID NO: 5326 - protein, 6 aa, synthetic construct
TSNGDD

SEQ ID NO: 5327 - protein, 6 aa, synthetic construct
IEVGHD

SEQ ID NO: 5328 - protein, 6 aa, synthetic construct
MEMGHD

SEQ ID NO: 5329 - protein, 6 aa, synthetic construct
AEVGHD

SEQ ID NO: 5330 - protein, 6 aa, synthetic construct
MDAGHD

SEQ ID NO: 5331 - protein, 6 aa, synthetic construct
VEWGHD

SEQ ID NO: 5332 - protein, 6 aa, synthetic construct
AEQGHD

SEQ ID NO: 5333 - protein, 6 aa, synthetic construct
LEWGHD

SEQ ID NO: 5334 - protein, 6 aa, synthetic construct
MELGHD

SEQ ID NO: 5335 - protein, 6 aa, synthetic construct
METGHD

SEQ ID NO: 5336 - protein, 6 aa, synthetic construct
MEAGHD

SEQ ID NO: 5337 - protein, 6 aa, synthetic construct
TINRQR

SEQ ID NO: 5338 - protein, 6 aa, synthetic construct
IESGHD

SEQ ID NO: 5339 - protein, 6 aa, synthetic construct
TAKDHD

SEQ ID NO: 5340 - protein, 6 aa, synthetic construct
MEVGHD

SEQ ID NO: 5341 - protein, 6 aa, synthetic construct
CEIGHD

SEQ ID NO: 5342 - protein, 6 aa, synthetic construct
ATNGHD

SEQ ID NO: 5343 - protein, 6 aa, synthetic construct
MDGGHD

SEQ ID NO: 5344 - protein, 6 aa, synthetic construct
QEVGHD

SEQ ID NO: 5345 - protein, 6 aa, synthetic construct
ADQGHD

SEQ ID NO: 5346 - protein, 6 aa, synthetic construct
NMNGHD

SEQ ID NO: 5347 - protein, 6 aa, synthetic construct
TPWEHD

SEQ ID NO: 5348 - protein, 6 aa, synthetic construct
IEMGHD

SEQ ID NO: 5349 - protein, 6 aa, synthetic construct
TANEHD

SEQ ID NO: 5350 - protein, 6 aa, synthetic construct
QQQGHD

SEQ ID NO: 5351 - protein, 6 aa, synthetic construct
TPQDHD

SEQ ID NO: 5352 - protein, 6 aa, synthetic construct
HDWGHD

SEQ ID NO: 5353 - protein, 6 aa, synthetic construct
IEGGHD

SEQ ID NO: 5354 - protein, 11 aa, synthetic construct
TINGHDSPHKR

SEQ ID NO: 5355 - protein, 11 aa, synthetic construct
MPEGHDSPHKS

SEQ ID NO: 5356 - protein, 11 aa, synthetic construct
MEGGHDSPHKS

SEQ ID NO: 5357 - protein, 11 aa, synthetic construct
MEYGHDSPHKS

SEQ ID NO: 5358 - protein, 11 aa, synthetic construct
AEWGHDSPHKS

SEQ ID NO: 5359 - protein, 11 aa, synthetic construct
CEWGHDSPHKS

SEQ ID NO: 5360 - protein, 11 aa, synthetic construct
ANNGQDSPHKS

SEQ ID NO: 5361 - protein, 11 aa, synthetic construct
IPEGHDSPHKS

SEQ ID NO: 5362 - protein, 11 aa, synthetic construct
ADMGHDSPHKS

SEQ ID NO: 5363 - protein, 11 aa, synthetic construct
IEYGHDSPHKS

SEQ ID NO: 5364 - protein, 11 aa, synthetic construct
ADYGHDSPHKS

SEQ ID NO: 5365 - protein, 11 aa, synthetic construct
IETGHDSPHKS

SEQ ID NO: 5366 - protein, 11 aa, synthetic construct
MEWGHDSPHKS

SEQ ID NO: 5367 - protein, 11 aa, synthetic construct
CEYGHDSPHKS

SEQ ID NO: 5368 - protein, 11 aa, synthetic construct
RINGHDSPHKS

SEQ ID NO: 5369 - protein, 11 aa, synthetic construct
MEIGHDSPHKS

SEQ ID NO: 5370 - protein, 11 aa, synthetic construct
LEYGHDSPHKS

SEQ ID NO: 5371 - protein, 11 aa, synthetic construct
ADWGHDSPHKS

SEQ ID NO: 5372 - protein, 11 aa, synthetic construct
IEIGHDSPHKS

SEQ ID NO: 5373 - protein, 11 aa, synthetic construct
TIKDNDSPHKS

SEQ ID NO: 5374 - protein, 11 aa, synthetic construct
DIMGHDSPHKS

SEQ ID NO: 5375 - protein, 11 aa, synthetic construct
FEQGHDSPHKS

SEQ ID NO: 5376 - protein, 11 aa, synthetic construct
MEFGHDSPHKS

SEQ ID NO: 5377 - protein, 11 aa, synthetic construct
CDQGHDSPHKS

SEQ ID NO: 5378 - protein, 11 aa, synthetic construct
LPEGHDSPHKS

SEQ ID NO: 5379 - protein, 11 aa, synthetic construct
IENGHDSPHKS

SEQ ID NO: 5380 - protein, 11 aa, synthetic construct
MESGHDSPHKS

SEQ ID NO: 5381 - protein, 11 aa, synthetic construct
AEIGHDSPHKS

SEQ ID NO: 5382 - protein, 11 aa, synthetic construct
VEYGHDSPHKS

SEQ ID NO: 5383 - protein, 11 aa, synthetic construct
TSNGDDSPHKS

SEQ ID NO: 5384 - protein, 11 aa, synthetic construct
IEVGHDSPHKS

SEQ ID NO: 5385 - protein, 11 aa, synthetic construct
MEMGHDSPHKS

SEQ ID NO: 5386 - protein, 11 aa, synthetic construct
AEVGHDSPHKS

SEQ ID NO: 5387 - protein, 11 aa, synthetic construct
MDAGHDSPHKS

SEQ ID NO: 5388 - protein, 11 aa, synthetic construct
VEWGHDSPHKS

SEQ ID NO: 5389 - protein, 11 aa, synthetic construct
AEQGHDSPHKS

SEQ ID NO: 5390 - protein, 11 aa, synthetic construct
LEWGHDSPHKS

SEQ ID NO: 5391 - protein, 11 aa, synthetic construct
MELGHDSPHKS

SEQ ID NO: 5392 - protein, 11 aa, synthetic construct
METGHDSPHKS

SEQ ID NO: 5393 - protein, 11 aa, synthetic construct
MEAGHDSPHKS

SEQ ID NO: 5394 - protein, 11 aa, synthetic construct
TINRQRSPHKS

SEQ ID NO: 5395 - protein, 11 aa, synthetic construct
IESGHDSPHKS

SEQ ID NO: 5396 - protein, 11 aa, synthetic construct
TAKDHDSPHKS

SEQ ID NO: 5397 - protein, 11 aa, synthetic construct
MEVGHDSPHKS

SEQ ID NO: 5398 - protein, 11 aa, synthetic construct
CEIGHDSPHKS

SEQ ID NO: 5399 - protein, 11 aa, synthetic construct
ATNGHDSPHKS

SEQ ID NO: 5400 - protein, 11 aa, synthetic construct
MDGGHDSPHKS

SEQ ID NO: 5401 - protein, 11 aa, synthetic construct
QEVGHDSPHKS

SEQ ID NO: 5402 - protein, 11 aa, synthetic construct
ADQGHDSPHKS

SEQ ID NO: 5403 - protein, 11 aa, synthetic construct
NMNGHDSPHKS

SEQ ID NO: 5404 - protein, 11 aa, synthetic construct
TPWEHDSPHKS

SEQ ID NO: 5405 - protein, 11 aa, synthetic construct
IEMGHDSPHKS

SEQ ID NO: 5406 - protein, 11 aa, synthetic construct
TANEHDSPHKS

SEQ ID NO: 5407 - protein, 11 aa, synthetic construct
TINGHDSPHKS

SEQ ID NO: 5408 - protein, 11 aa, synthetic construct
QQQGHDSPHKS

SEQ ID NO: 5409 - protein, 11 aa, synthetic construct
TPQDHDSPHKS

SEQ ID NO: 5410 - protein, 11 aa, synthetic construct
HDWGHDSPHKS

SEQ ID NO: 5411 - protein, 11 aa, synthetic construct
IEGGHDSPHKS

SEQ ID NO: 5412 - protein, 5 aa, synthetic construct
QNQQT

SEQ ID NO: 5413 - protein, 5 aa, synthetic construct
QNRHT

SEQ ID NO: 5414 - protein, 5 aa, synthetic construct
RDQQT

SEQ ID NO: 5415 - protein, 5 aa, synthetic construct
PNLQT

SEQ ID NO: 5416 - protein, 5 aa, synthetic construct
HVRQT

SEQ ID NO: 5417 - protein, 5 aa, synthetic construct
PNQHT

SEQ ID NO: 5418 - protein, 5 aa, synthetic construct
QSQQT

SEQ ID NO: 5419 - protein, 5 aa, synthetic construct
QNQQI

SEQ ID NO: 5420 - protein, 5 aa, synthetic construct
QPAKT

SEQ ID NO: 5421 - protein, 5 aa, synthetic construct
QTQQN

SEQ ID NO: 5422 - protein, 5 aa, synthetic construct
QNLAT

SEQ ID NO: 5423 - protein, 5 aa, synthetic construct
QNQLT

SEQ ID NO: 5424 - protein, 5 aa, synthetic construct
QGQQT

SEQ ID NO: 5425 - protein, 5 aa, synthetic construct
LNRQS

SEQ ID NO: 5426 - protein, 5 aa, synthetic construct
HNQQT

SEQ ID NO: 5427 - protein, 5 aa, synthetic construct
QNPPT

SEQ ID NO: 5428 - protein, 5 aa, synthetic construct
QNLQT

SEQ ID NO: 5429 - protein, 5 aa, synthetic construct
QYQQT

SEQ ID NO: 5430 - protein, 5 aa, synthetic construct
QDQET

SEQ ID NO: 5431 - protein, 5 aa, synthetic construct
QNHQT

SEQ ID NO: 5432 - protein, 5 aa, synthetic construct
QDQQT

SEQ ID NO: 5433 - protein, 5 aa, synthetic construct
HWQQT

SEQ ID NO: 5434 - protein, 5 aa, synthetic construct
PNQQT

SEQ ID NO: 5435 - protein, 5 aa, synthetic construct
QNQLI

SEQ ID NO: 5436 - protein, 5 aa, synthetic construct
PEQQT

SEQ ID NO: 5437 - protein, 5 aa, synthetic construct
QRTMT

SEQ ID NO: 5438 - protein, 5 aa, synthetic construct
QNQQH

SEQ ID NO: 5439 - protein, 5 aa, synthetic construct
LHQHT

SEQ ID NO: 5440 - protein, 5 aa, synthetic construct
QHRIT

SEQ ID NO: 5441 - protein, 5 aa, synthetic construct
QYIHT

SEQ ID NO: 5442 - protein, 5 aa, synthetic construct
QKFET

SEQ ID NO: 5443 - protein, 5 aa, synthetic construct
QFPST

SEQ ID NO: 5444 - protein, 5 aa, synthetic construct
HNQQR

SEQ ID NO: 5445 - protein, 5 aa, synthetic construct
QAIKT

SEQ ID NO: 5446 - protein, 5 aa, synthetic construct
QNRQT

SEQ ID NO: 5447 - protein, 5 aa, synthetic construct
QYQHT

SEQ ID NO: 5448 - protein, 5 aa, synthetic construct
QNPQS

SEQ ID NO: 5449 - protein, 5 aa, synthetic construct
QHQLT

SEQ ID NO: 5450 - protein, 5 aa, synthetic construct
QSPPT

SEQ ID NO: 5451 - protein, 5 aa, synthetic construct
QAKLT

SEQ ID NO: 5452 - protein, 5 aa, synthetic construct
KSQQT

SEQ ID NO: 5453 - protein, 5 aa, synthetic construct
QDRPT

SEQ ID NO: 5454 - protein, 5 aa, synthetic construct
QSQQL

SEQ ID NO: 5455 - protein, 5 aa, synthetic construct
QAFHT

SEQ ID NO: 5456 - protein, 5 aa, synthetic construct
QKQQD

SEQ ID NO: 5457 - protein, 5 aa, synthetic construct
QNAQT

SEQ ID NO: 5458 - protein, 5 aa, synthetic construct
HNQLT

SEQ ID NO: 5459 - protein, 5 aa, synthetic construct
QNQQY

SEQ ID NO: 5460 - protein, 5 aa, synthetic construct
QKLNT

SEQ ID NO: 5461 - protein, 5 aa, synthetic construct
QNVQT

SEQ ID NO: 5462 - protein, 5 aa, synthetic construct
QAQQT

SEQ ID NO: 5463 - protein, 5 aa, synthetic construct
QNLQA

SEQ ID NO: 5464 - protein, 5 aa, synthetic construct
QTPPT

SEQ ID NO: 5465 - protein, 5 aa, synthetic construct
QYQHA

SEQ ID NO: 5466 - protein, 5 aa, synthetic construct
QGQQA

SEQ ID NO: 5467 - protein, 5 aa, synthetic construct
QPPAT

SEQ ID NO: 5468 - protein, 5 aa, synthetic construct
QERPT

SEQ ID NO: 5469 - protein, 5 aa, synthetic construct
QDLQT

SEQ ID NO: 5470 - protein, 5 aa, synthetic construct
QAMHT

SEQ ID NO: 5471 - protein, 5 aa, synthetic construct
LNQQT

SEQ ID NO: 5472 - protein, 5 aa, synthetic construct
QHPST

SEQ ID NO: 5473 - protein, 5 aa, synthetic construct
PGLQT

SEQ ID NO: 5474 - protein, 5 aa, synthetic construct
QGIRT

SEQ ID NO: 5475 - protein, 5 aa, synthetic construct
QAPAT

SEQ ID NO: 5476 - protein, 5 aa, synthetic construct
QSQQI

SEQ ID NO: 5477 - protein, 5 aa, synthetic construct
QIPPT

SEQ ID NO: 5478 - protein, 5 aa, synthetic construct
QTQLT

SEQ ID NO: 5479 - protein, 5 aa, synthetic construct
QAPST

SEQ ID NO: 5480 - protein, 5 aa, synthetic construct
QNTYA

SEQ ID NO: 5481 - protein, 5 aa, synthetic construct
QNQHI

SEQ ID NO: 5482 - protein, 5 aa, synthetic construct
QNHLT

SEQ ID NO: 5483 - protein, 5 aa, synthetic construct
QIGMT

SEQ ID NO: 5484 - protein, 5 aa, synthetic construct
LNKQT

SEQ ID NO: 5485 - protein, 5 aa, synthetic construct
QLQQT

SEQ ID NO: 5486 - protein, 5 aa, synthetic construct
QRMST

SEQ ID NO: 5487 - protein, 5 aa, synthetic construct
QGILT

SEQ ID NO: 5488 - protein, 5 aa, synthetic construct
QDRQT

SEQ ID NO: 5489 - protein, 5 aa, synthetic construct
RDWQT

SEQ ID NO: 5490 - protein, 5 aa, synthetic construct
QNTHD

SEQ ID NO: 5491 - protein, 5 aa, synthetic construct
PNLQI

SEQ ID NO: 5492 - protein, 5 aa, synthetic construct
QERST

SEQ ID NO: 5493 - protein, 5 aa, synthetic construct
QNYQT

SEQ ID NO: 5494 - protein, 5 aa, synthetic construct
QRTCT

SEQ ID NO: 5495 - protein, 5 aa, synthetic construct
QIGHT

SEQ ID NO: 5496 - protein, 5 aa, synthetic construct
QGAIT

SEQ ID NO: 5497 - protein, 5 aa, synthetic construct
QVPPT

SEQ ID NO: 5498 - protein, 5 aa, synthetic construct
QVQQI

SEQ ID NO: 5499 - protein, 5 aa, synthetic construct
LMRQT

SEQ ID NO: 5500 - protein, 5 aa, synthetic construct
QYSVT

SEQ ID NO: 5501 - protein, 5 aa, synthetic construct
QAITT

SEQ ID NO: 5502 - protein, 5 aa, synthetic construct
QKTLT

SEQ ID NO: 5503 - protein, 5 aa, synthetic construct
QNQWT

SEQ ID NO: 5504 - protein, 5 aa, synthetic construct
QLHHT

SEQ ID NO: 5505 - protein, 5 aa, synthetic construct
QNIII

SEQ ID NO: 5506 - protein, 5 aa, synthetic construct
QGHHT

SEQ ID NO: 5507 - protein, 5 aa, synthetic construct
QSKVT

SEQ ID NO: 5508 - protein, 5 aa, synthetic construct
QLPST

SEQ ID NO: 5509 - protein, 5 aa, synthetic construct
IGKQT

SEQ ID NO: 5510 - protein, 5 aa, synthetic construct
QAIHT

SEQ ID NO: 5511 - protein, 5 aa, synthetic construct
QHGLT

SEQ ID NO: 5512 - protein, 5 aa, synthetic construct
QFMCT

SEQ ID NO: 5513 - protein, 5 aa, synthetic construct
QHLQT

SEQ ID NO: 5514 - protein, 5 aa, synthetic construct
QNHQN

SEQ ID NO: 5515 - protein, 5 aa, synthetic construct
QPART

SEQ ID NO: 5516 - protein, 5 aa, synthetic construct
QSLQT

SEQ ID NO: 5517 - protein, 5 aa, synthetic construct
QSQLT

SEQ ID NO: 5518 - protein, 5 aa, synthetic construct
QDRQS

SEQ ID NO: 5519 - protein, 5 aa, synthetic construct
QMPST

SEQ ID NO: 5520 - protein, 5 aa, synthetic construct
QGSLT

SEQ ID NO: 5521 - protein, 5 aa, synthetic construct
QVPAT

SEQ ID NO: 5522 - protein, 5 aa, synthetic construct
QDKQT

SEQ ID NO: 5523 - protein, 5 aa, synthetic construct
HYQQT

SEQ ID NO: 5524 - protein, 5 aa, synthetic construct
QVPST

SEQ ID NO: 5525 - protein, 5 aa, synthetic construct
RGEQT

SEQ ID NO: 5526 - protein, 5 aa, synthetic construct
PGQQT

SEQ ID NO: 5527 - protein, 5 aa, synthetic construct
QSLQI

SEQ ID NO: 5528 - protein, 5 aa, synthetic construct
LEQQT

SEQ ID NO: 5529 - protein, 5 aa, synthetic construct
QNQST

SEQ ID NO: 5530 - protein, 5 aa, synthetic construct
QKVIT

SEQ ID NO: 5531 - protein, 5 aa, synthetic construct
QNNDQ

SEQ ID NO: 5532 - protein, 5 aa, synthetic construct
QSVHT

SEQ ID NO: 5533 - protein, 5 aa, synthetic construct
QPLGT

SEQ ID NO: 5534 - protein, 5 aa, synthetic construct
HNQET

SEQ ID NO: 5535 - protein, 5 aa, synthetic construct
QNLQI

SEQ ID NO: 5536 - protein, 5 aa, synthetic construct
QIQQT

SEQ ID NO: 5537 - protein, 5 aa, synthetic construct
QVRNT

SEQ ID NO: 5538 - protein, 5 aa, synthetic construct
PSNQT

SEQ ID NO: 5539 - protein, 5 aa, synthetic construct
QVGHT

SEQ ID NO: 5540 - protein, 5 aa, synthetic construct
QRDIT

SEQ ID NO: 5541 - protein, 5 aa, synthetic construct
QMPNT

SEQ ID NO: 5542 - protein, 5 aa, synthetic construct
RGLQT

SEQ ID NO: 5543 - protein, 5 aa, synthetic construct
QKQQT

SEQ ID NO: 5544 - protein, 5 aa, synthetic construct
PSLQT

SEQ ID NO: 5545 - protein, 5 aa, synthetic construct
QRDQT

SEQ ID NO: 5546 - protein, 5 aa, synthetic construct
QAKGT

SEQ ID NO: 5547 - protein, 5 aa, synthetic construct
QSAHT

SEQ ID NO: 5548 - protein, 5 aa, synthetic construct
QSTMT

SEQ ID NO: 5549 - protein, 5 aa, synthetic construct
QREMT

SEQ ID NO: 5550 - protein, 5 aa, synthetic construct
QYRAT

SEQ ID NO: 5551 - protein, 5 aa, synthetic construct
QWQQT

SEQ ID NO: 5552 - protein, 5 aa, synthetic construct
QRMNT

SEQ ID NO: 5553 - protein, 5 aa, synthetic construct
GDSQT

SEQ ID NO: 5554 - protein, 5 aa, synthetic construct
QKIST

SEQ ID NO: 5555 - protein, 5 aa, synthetic construct
PSMQT

SEQ ID NO: 5556 - protein, 5 aa, synthetic construct
SPRQT

SEQ ID NO: 5557 - protein, 5 aa, synthetic construct
MEQQT

SEQ ID NO: 5558 - protein, 5 aa, synthetic construct
QYQNT

SEQ ID NO: 5559 - protein, 5 aa, synthetic construct
QHQQT

SEQ ID NO: 5560 - protein, 5 aa, synthetic construct
INQQT

SEQ ID NO: 5561 - protein, 5 aa, synthetic construct
PNQQH

SEQ ID NO: 5562 - protein, 5 aa, synthetic construct
ENRQT

SEQ ID NO: 5563 - protein, 5 aa, synthetic construct
QTQQA

SEQ ID NO: 5564 - protein, 5 aa, synthetic construct
QNQAT

SEQ ID NO: 5565 - protein, 4 aa, synthetic construct
KTII

SEQ ID NO: 5566 - protein, 4 aa, synthetic construct
KTFP

SEQ ID NO: 5567 - protein, 4 aa, synthetic construct
KTEK

SEQ ID NO: 5568 - protein, 4 aa, synthetic construct
KTVN

SEQ ID NO: 5569 - protein, 4 aa, synthetic construct
KTFN

SEQ ID NO: 5570 - protein, 4 aa, synthetic construct
KTIN

SEQ ID NO: 5571 - protein, 4 aa, synthetic construct
TTIN

SEQ ID NO: 5572 - protein, 4 aa, synthetic construct
KSIN

SEQ ID NO: 5573 - protein, 4 aa, synthetic construct
KTER

SEQ ID NO: 5574 - protein, 4 aa, synthetic construct
KELH

SEQ ID NO: 5575 - protein, 4 aa, synthetic construct
KAIN

SEQ ID NO: 5576 - protein, 4 aa, synthetic construct
KTDN

SEQ ID NO: 5577 - protein, 4 aa, synthetic construct
KTFH

SEQ ID NO: 5578 - protein, 4 aa, synthetic construct
KTSN

SEQ ID NO: 5579 - protein, 4 aa, synthetic construct
ETIN

SEQ ID NO: 5580 - protein, 4 aa, synthetic construct
NTIN

SEQ ID NO: 5581 - protein, 4 aa, synthetic construct
KTEN

SEQ ID NO: 5582 - protein, 4 aa, synthetic construct
KTSS

SEQ ID NO: 5583 - protein, 4 aa, synthetic construct
KTCN

SEQ ID NO: 5584 - protein, 4 aa, synthetic construct
KTEH

SEQ ID NO: 5585 - protein, 4 aa, synthetic construct
KAEM

SEQ ID NO: 5586 - protein, 4 aa, synthetic construct
KATN

SEQ ID NO: 5587 - protein, 4 aa, synthetic construct
KAIK

SEQ ID NO: 5588 - protein, 4 aa, synthetic construct
KTDK

SEQ ID NO: 5589 - protein, 4 aa, synthetic construct
KTFK

SEQ ID NO: 5590 - protein, 4 aa, synthetic construct
KSDQ

SEQ ID NO: 5591 - protein, 4 aa, synthetic construct
KTEI

SEQ ID NO: 5592 - protein, 4 aa, synthetic construct
KTID

SEQ ID NO: 5593 - protein, 4 aa, synthetic construct
KNTN

SEQ ID NO: 5594 - protein, 4 aa, synthetic construct
KTET

SEQ ID NO: 5595 - protein, 4 aa, synthetic construct
KTEL

SEQ ID NO: 5596 - protein, 4 aa, synthetic construct
KNIN

SEQ ID NO: 5597 - protein, 4 aa, synthetic construct
KTEA

SEQ ID NO: 5598 - protein, 4 aa, synthetic construct
KTAN

SEQ ID NO: 5599 - protein, 4 aa, synthetic construct
NTIY

SEQ ID NO: 5600 - protein, 4 aa, synthetic construct
KTFS

SEQ ID NO: 5601 - protein, 4 aa, synthetic construct
KTES

SEQ ID NO: 5602 - protein, 4 aa, synthetic construct
KTTN

SEQ ID NO: 5603 - protein, 4 aa, synthetic construct
KTED

SEQ ID NO: 5604 - protein, 4 aa, synthetic construct
KTNN

SEQ ID NO: 5605 - protein, 4 aa, synthetic construct
KEVH

SEQ ID NO: 5606 - protein, 4 aa, synthetic construct
KTIS

SEQ ID NO: 5607 - protein, 4 aa, synthetic construct
KTVR

SEQ ID NO: 5608 - protein, 4 aa, synthetic construct
KTDR

SEQ ID NO: 5609 - protein, 4 aa, synthetic construct
ETIK

SEQ ID NO: 5610 - protein, 4 aa, synthetic construct
KNHI

SEQ ID NO: 5611 - protein, 4 aa, synthetic construct
KESD

SEQ ID NO: 5612 - protein, 4 aa, synthetic construct
KTIK

SEQ ID NO: 5613 - protein, 4 aa, synthetic construct
KTDL

SEQ ID NO: 5614 - protein, 4 aa, synthetic construct
KTVP

SEQ ID NO: 5615 - protein, 4 aa, synthetic construct
KTVI

SEQ ID NO: 5616 - protein, 4 aa, synthetic construct
KAEH

SEQ ID NO: 5617 - protein, 4 aa, synthetic construct
KNCL

SEQ ID NO: 5618 - protein, 4 aa, synthetic construct
KTVK

SEQ ID NO: 5619 - protein, 4 aa, synthetic construct
KNAD

SEQ ID NO: 5620 - protein, 4 aa, synthetic construct
KTIT

SEQ ID NO: 5621 - protein, 4 aa, synthetic construct
KNCV

SEQ ID NO: 5622 - protein, 4 aa, synthetic construct
KNAL

SEQ ID NO: 5623 - protein, 4 aa, synthetic construct
KVIN

SEQ ID NO: 5624 - protein, 4 aa, synthetic construct
KTEF

SEQ ID NO: 5625 - protein, 4 aa, synthetic construct
KTRE

SEQ ID NO: 5626 - protein, 4 aa, synthetic construct
KQGE

SEQ ID NO: 5627 - protein, 4 aa, synthetic construct
KSEK

SEQ ID NO: 5628 - protein, 4 aa, synthetic construct
KNVN

SEQ ID NO: 5629 - protein, 4 aa, synthetic construct
KGGE

SEQ ID NO: 5630 - protein, 4 aa, synthetic construct
KEFV

SEQ ID NO: 5631 - protein, 4 aa, synthetic construct
KSDK

SEQ ID NO: 5632 - protein, 4 aa, synthetic construct
KTEQ

SEQ ID NO: 5633 - protein, 4 aa, synthetic construct
KEVQ

SEQ ID NO: 5634 - protein, 4 aa, synthetic construct
KTEY

SEQ ID NO: 5635 - protein, 4 aa, synthetic construct
KNCW

SEQ ID NO: 5636 - protein, 4 aa, synthetic construct
KTDV

SEQ ID NO: 5637 - protein, 4 aa, synthetic construct
KSDI

SEQ ID NO: 5638 - protein, 4 aa, synthetic construct
KNSI

SEQ ID NO: 5639 - protein, 4 aa, synthetic construct
KNSL

SEQ ID NO: 5640 - protein, 4 aa, synthetic construct
KEVV

SEQ ID NO: 5641 - protein, 4 aa, synthetic construct
KTEP

SEQ ID NO: 5642 - protein, 4 aa, synthetic construct
KSEL

SEQ ID NO: 5643 - protein, 4 aa, synthetic construct
KTWQ

SEQ ID NO: 5644 - protein, 4 aa, synthetic construct
KTEV

SEQ ID NO: 5645 - protein, 4 aa, synthetic construct
KAVN

SEQ ID NO: 5646 - protein, 4 aa, synthetic construct
KGVL

SEQ ID NO: 5647 - protein, 4 aa, synthetic construct
KTEG

SEQ ID NO: 5648 - protein, 4 aa, synthetic construct
KTRD

SEQ ID NO: 5649 - protein, 4 aa, synthetic construct
KTGN

SEQ ID NO: 5650 - protein, 4 aa, synthetic construct
KNAI

SEQ ID NO: 5651 - protein, 4 aa, synthetic construct
KAEN

SEQ ID NO: 5652 - protein, 4 aa, synthetic construct
KAET

SEQ ID NO: 5653 - protein, 4 aa, synthetic construct
KTVH

SEQ ID NO: 5654 - protein, 4 aa, synthetic construct
KETA

SEQ ID NO: 5655 - protein, 4 aa, synthetic construct
KNNL

SEQ ID NO: 5656 - protein, 4 aa, synthetic construct
EAIN

SEQ ID NO: 5657 - protein, 4 aa, synthetic construct
KSLN

SEQ ID NO: 5658 - protein, 4 aa, synthetic construct
KTIP

SEQ ID NO: 5659 - protein, 4 aa, synthetic construct
KTIH

SEQ ID NO: 5660 - protein, 18 aa, synthetic construct
KTINGSGSPHSKAQNQQT

SEQ ID NO: 5661 - protein, 5 aa, synthetic construct
NPHKS

SEQ ID NO: 5662 - protein, 6 aa, synthetic construct
NPHKSG

SEQ ID NO: 5663 - protein, 6 aa, synthetic construct
SPHKIV

SEQ ID NO: 5664 - protein, 6 aa, synthetic construct
GHDNPH

SEQ ID NO: 5665 - protein, 6 aa, synthetic construct
AHDSPH

SEQ ID NO: 5666 - protein, 6 aa, synthetic construct
KHDSPH

SEQ ID NO: 5667 - protein, 6 aa, synthetic construct
WHDSPH

SEQ ID NO: 5668 - protein, 6 aa, synthetic construct
RHDSPH

SEQ ID NO: 5669 - protein, 6 aa, synthetic construct
LHDSPH

SEQ ID NO: 5670 - protein, 6 aa, synthetic construct
IHDSPH

SEQ ID NO: 5671 - protein, 6 aa, synthetic construct
MHDSPH

SEQ ID NO: 5672 - protein, 6 aa, synthetic construct
NHDSPH

SEQ ID NO: 5673 - protein, 6 aa, synthetic construct
THDSPH

SEQ ID NO: 5674 - protein, 6 aa, synthetic construct
EHDSPH

SEQ ID NO: 5675 - protein, 6 aa, synthetic construct
QHDSPH

SEQ ID NO: 5676 - protein, 6 aa, synthetic construct
YHDSPH

SEQ ID NO: 5677 - protein, 6 aa, synthetic construct
HHDSPH

SEQ ID NO: 5678 - protein, 6 aa, synthetic construct
FHDSPH

SEQ ID NO: 5679 - protein, 6 aa, synthetic construct
VHDSPH

SEQ ID NO: 5680 - protein, 9 aa, synthetic construct
GHDNPHKSG

SEQ ID NO: 5681 - protein, 9 aa, synthetic construct
AHDSPHKSG

SEQ ID NO: 5682 - protein, 9 aa, synthetic construct
AHDSPHKIG

SEQ ID NO: 5683 - protein, 9 aa, synthetic construct
KHDSPHKSG

SEQ ID NO: 5684 - protein, 9 aa, synthetic construct
WHDSPHKSG

SEQ ID NO: 5685 - protein, 9 aa, synthetic construct
RHDSPHKSG

SEQ ID NO: 5686 - protein, 9 aa, synthetic construct
LHDSPHKSG

SEQ ID NO: 5687 - protein, 9 aa, synthetic construct
IHDSPHKSG

SEQ ID NO: 5688 - protein, 9 aa, synthetic construct
MHDSPHKSG

SEQ ID NO: 5689 - protein, 9 aa, synthetic construct
NHDSPHKSG

SEQ ID NO: 5690 - protein, 9 aa, synthetic construct
THDSPHKSG

SEQ ID NO: 5691 - protein, 9 aa, synthetic construct
EHDSPHKSG

SEQ ID NO: 5692 - protein, 9 aa, synthetic construct
QHDSPHKSG

SEQ ID NO: 5693 - protein, 9 aa, synthetic construct
RHDSPHKIV

SEQ ID NO: 5694 - protein, 9 aa, synthetic construct
YHDSPHKSG

SEQ ID NO: 5695 - protein, 9 aa, synthetic construct
HHDSPHKSG

SEQ ID NO: 5696 - protein, 9 aa, synthetic construct
FHDSPHKSG

SEQ ID NO: 5697 - protein, 9 aa, synthetic construct
VHDSPHKSG

SEQ ID NO: 5698 - protein, 5 aa, synthetic construct
QIRQT

SEQ ID NO: 5699 - protein, 5 aa, synthetic construct
QNQHA

SEQ ID NO: 5700 - protein, 5 aa, synthetic construct
QSVQT

SEQ ID NO: 5701 - protein, 5 aa, synthetic construct
RSQQT

SEQ ID NO: 5702 - protein, 5 aa, synthetic construct
QNKLE

SEQ ID NO: 5703 - protein, 5 aa, synthetic construct
QNQQK

SEQ ID NO: 5704 - protein, 5 aa, synthetic construct
QHQQA

SEQ ID NO: 5705 - protein, 5 aa, synthetic construct
QIQHT

SEQ ID NO: 5706 - protein, 5 aa, synthetic construct
PRQQT

SEQ ID NO: 5707 - protein, 5 aa, synthetic construct
HTQQT

SEQ ID NO: 5708 - protein, 5 aa, synthetic construct
QRQHT

SEQ ID NO: 5709 - protein, 5 aa, synthetic construct
QNQQS

SEQ ID NO: 5710 - protein, 5 aa, synthetic construct
RNQET

SEQ ID NO: 5711 - protein, 5 aa, synthetic construct
KNQQT

SEQ ID NO: 5712 - protein, 5 aa, synthetic construct
QTQQT

SEQ ID NO: 5713 - protein, 5 aa, synthetic construct
QTQQI

SEQ ID NO: 5714 - protein, 5 aa, synthetic construct
QSKQA

SEQ ID NO: 5715 - protein, 5 aa, synthetic construct
QNQPP

SEQ ID NO: 5716 - protein, 5 aa, synthetic construct
QSPQT

SEQ ID NO: 5717 - protein, 5 aa, synthetic construct
QNQQG

SEQ ID NO: 5718 - protein, 5 aa, synthetic construct
QNQHT

SEQ ID NO: 5719 - protein, 5 aa, synthetic construct
QTRQT

SEQ ID NO: 5720 - protein, 5 aa, synthetic construct
QNLHT

SEQ ID NO: 5721 - protein, 5 aa, synthetic construct
QNQET

SEQ ID NO: 5722 - protein, 5 aa, synthetic construct
LNQPT

SEQ ID NO: 5723 - protein, 5 aa, synthetic construct
QNQDT

SEQ ID NO: 5724 - protein, 5 aa, synthetic construct
RNQQT

SEQ ID NO: 5725 - protein, 5 aa, synthetic construct
QNLLT

SEQ ID NO: 5726 - protein, 5 aa, synthetic construct
QLVIT

SEQ ID NO: 5727 - protein, 5 aa, synthetic construct
RTQET

SEQ ID NO: 5728 - protein, 5 aa, synthetic construct
QTHQT

SEQ ID NO: 5729 - protein, 5 aa, synthetic construct
QNQPA

SEQ ID NO: 5730 - protein, 5 aa, synthetic construct
QDQHT

SEQ ID NO: 5731 - protein, 5 aa, synthetic construct
QSQHT

SEQ ID NO: 5732 - protein, 5 aa, synthetic construct
RNQQI

SEQ ID NO: 5733 - protein, 5 aa, synthetic construct
VRQQT

SEQ ID NO: 5734 - protein, 5 aa, synthetic construct
QNQHS

SEQ ID NO: 5735 - protein, 5 aa, synthetic construct
AWQQT

SEQ ID NO: 5736 - protein, 5 aa, synthetic construct
QSVPT

SEQ ID NO: 5737 - protein, 5 aa, synthetic construct
QNIQP

SEQ ID NO: 5738 - protein, 5 aa, synthetic construct
QNHLN

SEQ ID NO: 5739 - protein, 5 aa, synthetic construct
LDQQT

SEQ ID NO: 5740 - protein, 5 aa, synthetic construct
PDQQS

SEQ ID NO: 5741 - protein, 5 aa, synthetic construct
ESQQT

SEQ ID NO: 5742 - protein, 5 aa, synthetic construct
QNKQT

SEQ ID NO: 5743 - protein, 5 aa, synthetic construct
QRQLT

SEQ ID NO: 5744 - protein, 5 aa, synthetic construct
QIIVT

SEQ ID NO: 5745 - protein, 5 aa, synthetic construct
QKQST

SEQ ID NO: 5746 - protein, 5 aa, synthetic construct
QSHQT

SEQ ID NO: 5747 - protein, 5 aa, synthetic construct
QFVVT

SEQ ID NO: 5748 - protein, 5 aa, synthetic construct
QSQPT

SEQ ID NO: 5749 - protein, 5 aa, synthetic construct
QNEQT

SEQ ID NO: 5750 - protein, 5 aa, synthetic construct
RNRQT

SEQ ID NO: 5751 - protein, 5 aa, synthetic construct
QSKQT

SEQ ID NO: 5752 - protein, 5 aa, synthetic construct
QNPLT

SEQ ID NO: 5753 - protein, 5 aa, synthetic construct
RDQKT

SEQ ID NO: 5754 - protein, 5 aa, synthetic construct
HNQQN

SEQ ID NO: 5755 - protein, 5 aa, synthetic construct
QWKRT

SEQ ID NO: 5756 - protein, 5 aa, synthetic construct
QNHQI

SEQ ID NO: 5757 - protein, 5 aa, synthetic construct
QNQQA

SEQ ID NO: 5758 - protein, 5 aa, synthetic construct
QNQLN

SEQ ID NO: 5759 - protein, 5 aa, synthetic construct
QTQPT

SEQ ID NO: 5760 - protein, 5 aa, synthetic construct
QKQLT

SEQ ID NO: 5761 - protein, 5 aa, synthetic construct
RNQLA

SEQ ID NO: 5762 - protein, 5 aa, synthetic construct
RNQQS

SEQ ID NO: 5763 - protein, 5 aa, synthetic construct
ISIQT

SEQ ID NO: 5764 - protein, 5 aa, synthetic construct
QNQQN

SEQ ID NO: 5765 - protein, 5 aa, synthetic construct
QSQQS

SEQ ID NO: 5766 - protein, 5 aa, synthetic construct
QTVCT

SEQ ID NO: 5767 - protein, 5 aa, synthetic construct
QYQQI

SEQ ID NO: 5768 - protein, 5 aa, synthetic construct
QQIMT

SEQ ID NO: 5769 - protein, 5 aa, synthetic construct
QNEQS

SEQ ID NO: 5770 - protein, 5 aa, synthetic construct
LNHQT

SEQ ID NO: 5771 - protein, 5 aa, synthetic construct
QMIHT

SEQ ID NO: 5772 - protein, 5 aa, synthetic construct
RNHQS

SEQ ID NO: 5773 - protein, 5 aa, synthetic construct
QKMNT

SEQ ID NO: 5774 - protein, 5 aa, synthetic construct
QSQQN

SEQ ID NO: 5775 - protein, 4 aa, synthetic construct
KSIY

SEQ ID NO: 5776 - protein, 4 aa, synthetic construct
KIIN

SEQ ID NO: 5777 - protein, 4 aa, synthetic construct
KAII

SEQ ID NO: 5778 - protein, 4 aa, synthetic construct
KAIS

SEQ ID NO: 5779 - protein, 4 aa, synthetic construct
KTVD

SEQ ID NO: 5780 - protein, 4 aa, synthetic construct
KTIE

SEQ ID NO: 5781 - protein, 4 aa, synthetic construct
KTIY

SEQ ID NO: 5782 - protein, 4 aa, synthetic construct
KNVV

SEQ ID NO: 5783 - protein, 4 aa, synthetic construct
KTDA

SEQ ID NO: 5784 - protein, 4 aa, synthetic construct
KTEM

SEQ ID NO: 5785 - protein, 4 aa, synthetic construct
KIVN

SEQ ID NO: 5786 - protein, 4 aa, synthetic construct
KIGN

SEQ ID NO: 5787 - protein, 4 aa, synthetic construct
KEVM

SEQ ID NO: 5788 - protein, 4 aa, synthetic construct
KYQV

SEQ ID NO: 5789 - protein, 4 aa, synthetic construct
KTVE

SEQ ID NO: 5790 - protein, 4 aa, synthetic construct
KAID

SEQ ID NO: 5791 - protein, 4 aa, synthetic construct
KTIM

SEQ ID NO: 5792 - protein, 4 aa, synthetic construct
KEVG

SEQ ID NO: 5793 - protein, 4 aa, synthetic construct
KSEM

SEQ ID NO: 5794 - protein, 4 aa, synthetic construct
KAQQ

SEQ ID NO: 5795 - protein, 4 aa, synthetic construct
KCGE

SEQ ID NO: 5796 - protein, 4 aa, synthetic construct
KASN

SEQ ID NO: 5797 - protein, 4 aa, synthetic construct
KTIG

SEQ ID NO: 5798 - protein, 4 aa, synthetic construct
KTDP

SEQ ID NO: 5799 - protein, 4 aa, synthetic construct
KELV

SEQ ID NO: 5800 - protein, 4 aa, synthetic construct
KELM

SEQ ID NO: 5801 - protein, 4 aa, synthetic construct
KNEI

SEQ ID NO: 5802 - protein, 4 aa, synthetic construct
KTPN

SEQ ID NO: 5803 - protein, 4 aa, synthetic construct
KITN

SEQ ID NO: 5804 - protein, 4 aa, synthetic construct
KTDI

SEQ ID NO: 5805 - protein, 4 aa, synthetic construct
KTDQ

SEQ ID NO: 5806 - protein, 4 aa, synthetic construct
KGIN

SEQ ID NO: 5807 - protein, 4 aa, synthetic construct
KSEI

SEQ ID NO: 5808 - protein, 4 aa, synthetic construct
KWSA

SEQ ID NO: 5809 - protein, 4 aa, synthetic construct
KELA

SEQ ID NO: 5810 - protein, 4 aa, synthetic construct
KQTQ

SEQ ID NO: 5811 - protein, 4 aa, synthetic construct
KGAD

SEQ ID NO: 5812 - protein, 4 aa, synthetic construct
KVGE

SEQ ID NO: 5813 - protein, 4 aa, synthetic construct
KANE

SEQ ID NO: 5814 - protein, 4 aa, synthetic construct
KTDT

SEQ ID NO: 5815 - protein, 4 aa, synthetic construct
KTCI

SEQ ID NO: 5816 - protein, 4 aa, synthetic construct
KELR

SEQ ID NO: 5817 - protein, 4 aa, synthetic construct
KCQI

SEQ ID NO: 5818 - protein, 4 aa, synthetic construct
KGVM

SEQ ID NO: 5819 - protein, 4 aa, synthetic construct
KACD

SEQ ID NO: 5820 - protein, 4 aa, synthetic construct
KNEL

SEQ ID NO: 5821 - protein, 4 aa, synthetic construct
KAAE

SEQ ID NO: 5822 - protein, 4 aa, synthetic construct
KGQN

SEQ ID NO: 5823 - protein, 4 aa, synthetic construct
KNEF

SEQ ID NO: 5824 - protein, 4 aa, synthetic construct
KTSI

SEQ ID NO: 5825 - protein, 4 aa, synthetic construct
KCDQ

SEQ ID NO: 5826 - protein, 4 aa, synthetic construct
KEIL

SEQ ID NO: 5827 - protein, 4 aa, synthetic construct
KTPD

SEQ ID NO: 5828 - protein, 18 aa, synthetic construct
KTINGHDSPHKSGQNQQT

SEQ ID NO: 5829 - protein, 4 aa, synthetic construct
SKAQ

SEQ ID NO: 5830 - protein, 4 aa, synthetic construct
SMYM

SEQ ID NO: 5831 - protein, 4 aa, synthetic construct
SKAF

SEQ ID NO: 5832 - protein, 4 aa, synthetic construct
SKLK

SEQ ID NO: 5833 - protein, 4 aa, synthetic construct
SKRH

SEQ ID NO: 5834 - protein, 4 aa, synthetic construct
SKWR

SEQ ID NO: 5835 - protein, 4 aa, synthetic construct
SRCR

SEQ ID NO: 5836 - protein, 4 aa, synthetic construct
SFTC

SEQ ID NO: 5837 - protein, 4 aa, synthetic construct
SKFF

SEQ ID NO: 5838 - protein, 4 aa, synthetic construct
IVWQ

SEQ ID NO: 5839 - protein, 4 aa, synthetic construct
SKYF

SEQ ID NO: 5840 - protein, 4 aa, synthetic construct
SKAR

SEQ ID NO: 5841 - protein, 4 aa, synthetic construct
SCHQ

SEQ ID NO: 5842 - protein, 4 aa, synthetic construct
FPWQ

SEQ ID NO: 5843 - protein, 4 aa, synthetic construct
SKIR

SEQ ID NO: 5844 - protein, 4 aa, synthetic construct
VYYQ

SEQ ID NO: 5845 - protein, 4 aa, synthetic construct
SLYW

SEQ ID NO: 5846 - protein, 4 aa, synthetic construct
SKPK

SEQ ID NO: 5847 - protein, 4 aa, synthetic construct
SRFW

SEQ ID NO: 5848 - protein, 4 aa, synthetic construct
SRMR

SEQ ID NO: 5849 - protein, 4 aa, synthetic construct
SVKK

SEQ ID NO: 5850 - protein, 4 aa, synthetic construct
SWAP

SEQ ID NO: 5851 - protein, 4 aa, synthetic construct
SLWK

SEQ ID NO: 5852 - protein, 4 aa, synthetic construct
SFRP

SEQ ID NO: 5853 - protein, 4 aa, synthetic construct
SKKV

SEQ ID NO: 5854 - protein, 4 aa, synthetic construct
SYAF

SEQ ID NO: 5855 - protein, 4 aa, synthetic construct
SKAC

SEQ ID NO: 5856 - protein, 4 aa, synthetic construct
SKRL

SEQ ID NO: 5857 - protein, 4 aa, synthetic construct
SCSR

SEQ ID NO: 5858 - protein, 4 aa, synthetic construct
SRCP

SEQ ID NO: 5859 - protein, 4 aa, synthetic construct
SGAC

SEQ ID NO: 5860 - protein, 4 aa, synthetic construct
SKFR

SEQ ID NO: 5861 - protein, 4 aa, synthetic construct
SFPF

SEQ ID NO: 5862 - protein, 4 aa, synthetic construct
SFFG

SEQ ID NO: 5863 - protein, 4 aa, synthetic construct
SMCQ

SEQ ID NO: 5864 - protein, 4 aa, synthetic construct
SKLF

SEQ ID NO: 5865 - protein, 4 aa, synthetic construct
SKTR

SEQ ID NO: 5866 - protein, 4 aa, synthetic construct
SGKR

SEQ ID NO: 5867 - protein, 4 aa, synthetic construct
FYRQ

SEQ ID NO: 5868 - protein, 4 aa, synthetic construct
CRVQ

SEQ ID NO: 5869 - protein, 4 aa, synthetic construct
YGIQ

SEQ ID NO: 5870 - protein, 4 aa, synthetic construct
VNCQ

SEQ ID NO: 5871 - protein, 4 aa, synthetic construct
SKPF

SEQ ID NO: 5872 - protein, 4 aa, synthetic construct
SLAW

SEQ ID NO: 5873 - protein, 4 aa, synthetic construct
SKRS

SEQ ID NO: 5874 - protein, 4 aa, synthetic construct
WSYQ

SEQ ID NO: 5875 - protein, 4 aa, synthetic construct
RWLQ

SEQ ID NO: 5876 - protein, 4 aa, synthetic construct
PSCQ

SEQ ID NO: 5877 - protein, 4 aa, synthetic construct
SSWL

SEQ ID NO: 5878 - protein, 4 aa, synthetic construct
SKRR

SEQ ID NO: 5879 - protein, 4 aa, synthetic construct
SKGC

SEQ ID NO: 5880 - protein, 4 aa, synthetic construct
VPWQ

SEQ ID NO: 5881 - protein, 4 aa, synthetic construct
SKRY

SEQ ID NO: 5882 - protein, 4 aa, synthetic construct
SGCQ

SEQ ID NO: 5883 - protein, 4 aa, synthetic construct
SFTP

SEQ ID NO: 5884 - protein, 4 aa, synthetic construct
STTC

SEQ ID NO: 5885 - protein, 4 aa, synthetic construct
PKRQ

SEQ ID NO: 5886 - protein, 4 aa, synthetic construct
SKCF

SEQ ID NO: 5887 - protein, 4 aa, synthetic construct
WVPQ

SEQ ID NO: 5888 - protein, 4 aa, synthetic construct
SFWS

SEQ ID NO: 5889 - protein, 4 aa, synthetic construct
SKFK

SEQ ID NO: 5890 - protein, 4 aa, synthetic construct
RIKQ

SEQ ID NO: 5891 - protein, 4 aa, synthetic construct
SKAP

SEQ ID NO: 5892 - protein, 4 aa, synthetic construct
SFRY

SEQ ID NO: 5893 - protein, 4 aa, synthetic construct
SKMI

SEQ ID NO: 5894 - protein, 4 aa, synthetic construct
LRWQ

SEQ ID NO: 5895 - protein, 4 aa, synthetic construct
LPTQ

SEQ ID NO: 5896 - protein, 4 aa, synthetic construct
SKWK

SEQ ID NO: 5897 - protein, 4 aa, synthetic construct
SYMR

SEQ ID NO: 5898 - protein, 4 aa, synthetic construct
SKAA

SEQ ID NO: 5899 - protein, 4 aa, synthetic construct
LLCQ

SEQ ID NO: 5900 - protein, 4 aa, synthetic construct
RCCQ

SEQ ID NO: 5901 - protein, 4 aa, synthetic construct
LCVQ

SEQ ID NO: 5902 - protein, 4 aa, synthetic construct
SKLT

SEQ ID NO: 5903 - protein, 4 aa, synthetic construct
SKLC

SEQ ID NO: 5904 - protein, 4 aa, synthetic construct
SYLV

SEQ ID NO: 5905 - protein, 4 aa, synthetic construct
QGCQ

SEQ ID NO: 5906 - protein, 4 aa, synthetic construct
MAFQ

SEQ ID NO: 5907 - protein, 4 aa, synthetic construct
SKWG

SEQ ID NO: 5908 - protein, 4 aa, synthetic construct
SKIL

SEQ ID NO: 5909 - protein, 4 aa, synthetic construct
SFQI

SEQ ID NO: 5910 - protein, 4 aa, synthetic construct
SKAL

SEQ ID NO: 5911 - protein, 4 aa, synthetic construct
SKAH

SEQ ID NO: 5912 - protein, 4 aa, synthetic construct
SLCL

SEQ ID NO: 5913 - protein, 4 aa, synthetic construct
RPWQ

SEQ ID NO: 5914 - protein, 4 aa, synthetic construct
RPRQ

SEQ ID NO: 5915 - protein, 4 aa, synthetic construct
SCPQ

SEQ ID NO: 5916 - protein, 4 aa, synthetic construct
SVRY

SEQ ID NO: 5917 - protein, 4 aa, synthetic construct
SVRC

SEQ ID NO: 5918 - protein, 4 aa, synthetic construct
SKMP

SEQ ID NO: 5919 - protein, 4 aa, synthetic construct
SKKT

SEQ ID NO: 5920 - protein, 4 aa, synthetic construct
SLPY

SEQ ID NO: 5921 - protein, 4 aa, synthetic construct
VYHQ

SEQ ID NO: 5922 - protein, 4 aa, synthetic construct
SYTR

SEQ ID NO: 5923 - protein, 4 aa, synthetic construct
LVYQ

SEQ ID NO: 5924 - protein, 4 aa, synthetic construct
YRYQ

SEQ ID NO: 5925 - protein, 4 aa, synthetic construct
SWLK

SEQ ID NO: 5926 - protein, 4 aa, synthetic construct
CPAQ

SEQ ID NO: 5927 - protein, 4 aa, synthetic construct
SMCT

SEQ ID NO: 5928 - protein, 4 aa, synthetic construct
SPPD

SEQ ID NO: 5929 - protein, 4 aa, synthetic construct
SKRN

SEQ ID NO: 5930 - protein, 4 aa, synthetic construct
RWTQ

SEQ ID NO: 5931 - protein, 4 aa, synthetic construct
PRKQ

SEQ ID NO: 5932 - protein, 4 aa, synthetic construct
SKCS

SEQ ID NO: 5933 - protein, 4 aa, synthetic construct
PFVQ

SEQ ID NO: 5934 - protein, 4 aa, synthetic construct
SKLP

SEQ ID NO: 5935 - protein, 4 aa, synthetic construct
SKSE

SEQ ID NO: 5936 - protein, 4 aa, synthetic construct
WVAQ

SEQ ID NO: 5937 - protein, 4 aa, synthetic construct
SLYQ

SEQ ID NO: 5938 - protein, 4 aa, synthetic construct
SKVR

SEQ ID NO: 5939 - protein, 4 aa, synthetic construct
CALQ

SEQ ID NO: 5940 - protein, 4 aa, synthetic construct
SSCT

SEQ ID NO: 5941 - protein, 4 aa, synthetic construct
SKNS

SEQ ID NO: 5942 - protein, 4 aa, synthetic construct
SKRK

SEQ ID NO: 5943 - protein, 4 aa, synthetic construct
LCTQ

SEQ ID NO: 5944 - protein, 4 aa, synthetic construct
STCL

SEQ ID NO: 5945 - protein, 4 aa, synthetic construct
SYAR

SEQ ID NO: 5946 - protein, 4 aa, synthetic construct
SKQR

SEQ ID NO: 5947 - protein, 4 aa, synthetic construct
SKRV

SEQ ID NO: 5948 - protein, 4 aa, synthetic construct
KSGQ

SEQ ID NO: 5949 - protein, 4 aa, synthetic construct
SYYS

SEQ ID NO: 5950 - protein, 4 aa, synthetic construct
SLTC

SEQ ID NO: 5951 - protein, 4 aa, synthetic construct
SCQS

SEQ ID NO: 5952 - protein, 4 aa, synthetic construct
SKAK

SEQ ID NO: 5953 - protein, 4 aa, synthetic construct
SKPQ

SEQ ID NO: 5954 - protein, 4 aa, synthetic construct
FPFQ

SEQ ID NO: 5955 - protein, 4 aa, synthetic construct
SKCT

SEQ ID NO: 5956 - protein, 4 aa, synthetic construct
SVFE

SEQ ID NO: 5957 - protein, 4 aa, synthetic construct
GRYQ

SEQ ID NO: 5958 - protein, 4 aa, synthetic construct
KAQA

SEQ ID NO: 5959 - protein, 4 aa, synthetic construct
KAQN

SEQ ID NO: 5960 - protein, 4 aa, synthetic construct
MYMN

SEQ ID NO: 5961 - protein, 4 aa, synthetic construct
KAFY

SEQ ID NO: 5962 - protein, 4 aa, synthetic construct
KLKR

SEQ ID NO: 5963 - protein, 4 aa, synthetic construct
KRHR

SEQ ID NO: 5964 - protein, 4 aa, synthetic construct
KAQK

SEQ ID NO: 5965 - protein, 4 aa, synthetic construct
KWRL

SEQ ID NO: 5966 - protein, 4 aa, synthetic construct
RCRN

SEQ ID NO: 5967 - protein, 4 aa, synthetic construct
FTCN

SEQ ID NO: 5968 - protein, 4 aa, synthetic construct
KFFI

SEQ ID NO: 5969 - protein, 4 aa, synthetic construct
KAQY

SEQ ID NO: 5970 - protein, 4 aa, synthetic construct
VWQN

SEQ ID NO: 5971 - protein, 4 aa, synthetic construct
KYFM

SEQ ID NO: 5972 - protein, 4 aa, synthetic construct
KARQ

SEQ ID NO: 5973 - protein, 4 aa, synthetic construct
CHQN

SEQ ID NO: 5974 - protein, 4 aa, synthetic construct
PWQN

SEQ ID NO: 5975 - protein, 4 aa, synthetic construct
KIRR

SEQ ID NO: 5976 - protein, 4 aa, synthetic construct
YYQN

SEQ ID NO: 5977 - protein, 4 aa, synthetic construct
LYWN

SEQ ID NO: 5978 - protein, 4 aa, synthetic construct
KPKR

SEQ ID NO: 5979 - protein, 4 aa, synthetic construct
KAFS

SEQ ID NO: 5980 - protein, 4 aa, synthetic construct
RFWN

SEQ ID NO: 5981 - protein, 4 aa, synthetic construct
KAQC

SEQ ID NO: 5982 - protein, 4 aa, synthetic construct
RMRN

SEQ ID NO: 5983 - protein, 4 aa, synthetic construct
VKKN

SEQ ID NO: 5984 - protein, 4 aa, synthetic construct
WAPN

SEQ ID NO: 5985 - protein, 4 aa, synthetic construct
LWKN

SEQ ID NO: 5986 - protein, 4 aa, synthetic construct
KARW

SEQ ID NO: 5987 - protein, 4 aa, synthetic construct
FRPN

SEQ ID NO: 5988 - protein, 4 aa, synthetic construct
KKVF

SEQ ID NO: 5989 - protein, 4 aa, synthetic construct
YAFN

SEQ ID NO: 5990 - protein, 4 aa, synthetic construct
KACS

SEQ ID NO: 5991 - protein, 4 aa, synthetic construct
KRLW

SEQ ID NO: 5992 - protein, 4 aa, synthetic construct
CSRN

SEQ ID NO: 5993 - protein, 4 aa, synthetic construct
RCPN

SEQ ID NO: 5994 - protein, 4 aa, synthetic construct
GACN

SEQ ID NO: 5995 - protein, 4 aa, synthetic construct
KFRQ

SEQ ID NO: 5996 - protein, 4 aa, synthetic construct
FPFN

SEQ ID NO: 5997 - protein, 4 aa, synthetic construct
FFGN

SEQ ID NO: 5998 - protein, 4 aa, synthetic construct
MCQN

SEQ ID NO: 5999 - protein, 4 aa, synthetic construct
KLFW

SEQ ID NO: 6000 - protein, 4 aa, synthetic construct
KTRK

SEQ ID NO: 6001 - protein, 4 aa, synthetic construct
GKRN

SEQ ID NO: 6002 - protein, 4 aa, synthetic construct
YRQN

SEQ ID NO: 6003 - protein, 4 aa, synthetic construct
RVQN

SEQ ID NO: 6004 - protein, 4 aa, synthetic construct
GIQN

SEQ ID NO: 6005 - protein, 4 aa, synthetic construct
KAQR

SEQ ID NO: 6006 - protein, 4 aa, synthetic construct
NCQN

SEQ ID NO: 6007 - protein, 4 aa, synthetic construct
KPFR

SEQ ID NO: 6008 - protein, 4 aa, synthetic construct
LAWN

SEQ ID NO: 6009 - protein, 4 aa, synthetic construct
KRSY

SEQ ID NO: 6010 - protein, 4 aa, synthetic construct
SYQN

SEQ ID NO: 6011 - protein, 4 aa, synthetic construct
WLQN

SEQ ID NO: 6012 - protein, 4 aa, synthetic construct
SCQN

SEQ ID NO: 6013 - protein, 4 aa, synthetic construct
SWLN

SEQ ID NO: 6014 - protein, 4 aa, synthetic construct
KRRA

SEQ ID NO: 6015 - protein, 4 aa, synthetic construct
KAQT

SEQ ID NO: 6016 - protein, 4 aa, synthetic construct
KGCT

SEQ ID NO: 6017 - protein, 4 aa, synthetic construct
KRYT

SEQ ID NO: 6018 - protein, 4 aa, synthetic construct
GCQN

SEQ ID NO: 6019 - protein, 4 aa, synthetic construct
FTPN

SEQ ID NO: 6020 - protein, 4 aa, synthetic construct
TTCN

SEQ ID NO: 6021 - protein, 4 aa, synthetic construct
KARM

SEQ ID NO: 6022 - protein, 4 aa, synthetic construct
KRQN

SEQ ID NO: 6023 - protein, 4 aa, synthetic construct
KCFL

SEQ ID NO: 6024 - protein, 4 aa, synthetic construct
VPQN

SEQ ID NO: 6025 - protein, 4 aa, synthetic construct
FWSN

SEQ ID NO: 6026 - protein, 4 aa, synthetic construct
KFKN

SEQ ID NO: 6027 - protein, 4 aa, synthetic construct
IKQN

SEQ ID NO: 6028 - protein, 4 aa, synthetic construct
KAPR

SEQ ID NO: 6029 - protein, 4 aa, synthetic construct
FRYN

SEQ ID NO: 6030 - protein, 4 aa, synthetic construct
KMIC

SEQ ID NO: 6031 - protein, 4 aa, synthetic construct
RWQN

SEQ ID NO: 6032 - protein, 4 aa, synthetic construct
PTQN

SEQ ID NO: 6033 - protein, 4 aa, synthetic construct
KWKS

SEQ ID NO: 6034 - protein, 4 aa, synthetic construct
YMRN

SEQ ID NO: 6035 - protein, 4 aa, synthetic construct
KAAR

SEQ ID NO: 6036 - protein, 4 aa, synthetic construct
LCQN

SEQ ID NO: 6037 - protein, 4 aa, synthetic construct
CCQN

SEQ ID NO: 6038 - protein, 4 aa, synthetic construct
CVQN

SEQ ID NO: 6039 - protein, 4 aa, synthetic construct
KLTR

SEQ ID NO: 6040 - protein, 4 aa, synthetic construct
KLCT

SEQ ID NO: 6041 - protein, 4 aa, synthetic construct
KIRG

SEQ ID NO: 6042 - protein, 4 aa, synthetic construct
YLVN

SEQ ID NO: 6043 - protein, 4 aa, synthetic construct
AFQN

SEQ ID NO: 6044 - protein, 4 aa, synthetic construct
KACQ

SEQ ID NO: 6045 - protein, 4 aa, synthetic construct
KWGL

SEQ ID NO: 6046 - protein, 4 aa, synthetic construct
KILR

SEQ ID NO: 6047 - protein, 4 aa, synthetic construct
FQIN

SEQ ID NO: 6048 - protein, 4 aa, synthetic construct
KACI

SEQ ID NO: 6049 - protein, 4 aa, synthetic construct
KALR

SEQ ID NO: 6050 - protein, 4 aa, synthetic construct
KAHA

SEQ ID NO: 6051 - protein, 4 aa, synthetic construct
LCLN

SEQ ID NO: 6052 - protein, 4 aa, synthetic construct
KAFV

SEQ ID NO: 6053 - protein, 4 aa, synthetic construct
PRQN

SEQ ID NO: 6054 - protein, 4 aa, synthetic construct
CPQN

SEQ ID NO: 6055 - protein, 4 aa, synthetic construct
KAQF

SEQ ID NO: 6056 - protein, 4 aa, synthetic construct
VRYN

SEQ ID NO: 6057 - protein, 4 aa, synthetic construct
VRCN

SEQ ID NO: 6058 - protein, 4 aa, synthetic construct
KMPC

SEQ ID NO: 6059 - protein, 4 aa, synthetic construct
KKTS

SEQ ID NO: 6060 - protein, 4 aa, synthetic construct
LPYN

SEQ ID NO: 6061 - protein, 4 aa, synthetic construct
YHQN

SEQ ID NO: 6062 - protein, 4 aa, synthetic construct
KAQS

SEQ ID NO: 6063 - protein, 4 aa, synthetic construct
YTRN

SEQ ID NO: 6064 - protein, 4 aa, synthetic construct
VYQN

SEQ ID NO: 6065 - protein, 4 aa, synthetic construct
RYQN

SEQ ID NO: 6066 - protein, 4 aa, synthetic construct
WLKN

SEQ ID NO: 6067 - protein, 4 aa, synthetic construct
KAQM

SEQ ID NO: 6068 - protein, 4 aa, synthetic construct
PAQN

SEQ ID NO: 6069 - protein, 4 aa, synthetic construct
MCTN

SEQ ID NO: 6070 - protein, 4 aa, synthetic construct
PPDN

SEQ ID NO: 6071 - protein, 4 aa, synthetic construct
KRNY

SEQ ID NO: 6072 - protein, 4 aa, synthetic construct
WTQN

SEQ ID NO: 6073 - protein, 4 aa, synthetic construct
KACR

SEQ ID NO: 6074 - protein, 4 aa, synthetic construct
RKQN

SEQ ID NO: 6075 - protein, 4 aa, synthetic construct
KCSV

SEQ ID NO: 6076 - protein, 4 aa, synthetic construct
KARI

SEQ ID NO: 6077 - protein, 4 aa, synthetic construct
FVQN

SEQ ID NO: 6078 - protein, 4 aa, synthetic construct
KLPK

SEQ ID NO: 6079 - protein, 4 aa, synthetic construct
KSEQ

SEQ ID NO: 6080 - protein, 4 aa, synthetic construct
VAQN

SEQ ID NO: 6081 - protein, 4 aa, synthetic construct
LYQN

SEQ ID NO: 6082 - protein, 4 aa, synthetic construct
KVRM

SEQ ID NO: 6083 - protein, 4 aa, synthetic construct
ALQN

SEQ ID NO: 6084 - protein, 4 aa, synthetic construct
SCTN

SEQ ID NO: 6085 - protein, 4 aa, synthetic construct
KNSR

SEQ ID NO: 6086 - protein, 4 aa, synthetic construct
KRKR

SEQ ID NO: 6087 - protein, 4 aa, synthetic construct
CTQN

SEQ ID NO: 6088 - protein, 4 aa, synthetic construct
TCLN

SEQ ID NO: 6089 - protein, 4 aa, synthetic construct
YARN

SEQ ID NO: 6090 - protein, 4 aa, synthetic construct
KQRP

SEQ ID NO: 6091 - protein, 4 aa, synthetic construct
KRVV

SEQ ID NO: 6092 - protein, 4 aa, synthetic construct
SGQN

SEQ ID NO: 6093 - protein, 4 aa, synthetic construct
YYSN

SEQ ID NO: 6094 - protein, 4 aa, synthetic construct
LTCN

SEQ ID NO: 6095 - protein, 4 aa, synthetic construct
CQSN

SEQ ID NO: 6096 - protein, 4 aa, synthetic construct
KAKG

SEQ ID NO: 6097 - protein, 4 aa, synthetic construct
KPQN

SEQ ID NO: 6098 - protein, 4 aa, synthetic construct
PFQN

SEQ ID NO: 6099 - protein, 4 aa, synthetic construct
KCTS

SEQ ID NO: 6100 - protein, 4 aa, synthetic construct
VFEN

SEQ ID NO: 6101 - protein, 4 aa, synthetic construct
KAKK

SEQ ID NO: 6102 - protein, 5 aa, synthetic construct
SKAQA

SEQ ID NO: 6103 - protein, 5 aa, synthetic construct
SKAQN

SEQ ID NO: 6104 - protein, 5 aa, synthetic construct
SMYMN

SEQ ID NO: 6105 - protein, 5 aa, synthetic construct
SKAFY

SEQ ID NO: 6106 - protein, 5 aa, synthetic construct
SKLKR

SEQ ID NO: 6107 - protein, 5 aa, synthetic construct
SKRHR

SEQ ID NO: 6108 - protein, 5 aa, synthetic construct
SKAQK

SEQ ID NO: 6109 - protein, 5 aa, synthetic construct
SKWRL

SEQ ID NO: 6110 - protein, 5 aa, synthetic construct
SRCRN

SEQ ID NO: 6111 - protein, 5 aa, synthetic construct
SFTCN

SEQ ID NO: 6112 - protein, 5 aa, synthetic construct
SKFFI

SEQ ID NO: 6113 - protein, 5 aa, synthetic construct
SKAQY

SEQ ID NO: 6114 - protein, 5 aa, synthetic construct
IVWQN

SEQ ID NO: 6115 - protein, 5 aa, synthetic construct
SKYFM

SEQ ID NO: 6116 - protein, 5 aa, synthetic construct
SKARQ

SEQ ID NO: 6117 - protein, 5 aa, synthetic construct
SCHQN

SEQ ID NO: 6118 - protein, 5 aa, synthetic construct
FPWQN

SEQ ID NO: 6119 - protein, 5 aa, synthetic construct
SKIRR

SEQ ID NO: 6120 - protein, 5 aa, synthetic construct
VYYQN

SEQ ID NO: 6121 - protein, 5 aa, synthetic construct
SLYWN

SEQ ID NO: 6122 - protein, 5 aa, synthetic construct
SKPKR

SEQ ID NO: 6123 - protein, 5 aa, synthetic construct
SKAFS

SEQ ID NO: 6124 - protein, 5 aa, synthetic construct
SRFWN

SEQ ID NO: 6125 - protein, 5 aa, synthetic construct
SKAQC

SEQ ID NO: 6126 - protein, 5 aa, synthetic construct
SRMRN

SEQ ID NO: 6127 - protein, 5 aa, synthetic construct
SVKKN

SEQ ID NO: 6128 - protein, 5 aa, synthetic construct
SWAPN

SEQ ID NO: 6129 - protein, 5 aa, synthetic construct
SLWKN

SEQ ID NO: 6130 - protein, 5 aa, synthetic construct
SKARW

SEQ ID NO: 6131 - protein, 5 aa, synthetic construct
SFRPN

SEQ ID NO: 6132 - protein, 5 aa, synthetic construct
SKKVF

SEQ ID NO: 6133 - protein, 5 aa, synthetic construct
SYAFN

SEQ ID NO: 6134 - protein, 5 aa, synthetic construct
SKACS

SEQ ID NO: 6135 - protein, 5 aa, synthetic construct
SKRLW

SEQ ID NO: 6136 - protein, 5 aa, synthetic construct
SCSRN

SEQ ID NO: 6137 - protein, 5 aa, synthetic construct
SRCPN

SEQ ID NO: 6138 - protein, 5 aa, synthetic construct
SGACN

SEQ ID NO: 6139 - protein, 5 aa, synthetic construct
SKFRQ

SEQ ID NO: 6140 - protein, 5 aa, synthetic construct
SFPFN

SEQ ID NO: 6141 - protein, 5 aa, synthetic construct
SFFGN

SEQ ID NO: 6142 - protein, 5 aa, synthetic construct
SMCQN

SEQ ID NO: 6143 - protein, 5 aa, synthetic construct
SKLFW

SEQ ID NO: 6144 - protein, 5 aa, synthetic construct
SKTRK

SEQ ID NO: 6145 - protein, 5 aa, synthetic construct
SGKRN

SEQ ID NO: 6146 - protein, 5 aa, synthetic construct
FYRQN

SEQ ID NO: 6147 - protein, 5 aa, synthetic construct
CRVQN

SEQ ID NO: 6148 - protein, 5 aa, synthetic construct
YGIQN

SEQ ID NO: 6149 - protein, 5 aa, synthetic construct
SKAQR

SEQ ID NO: 6150 - protein, 5 aa, synthetic construct
VNCQN

SEQ ID NO: 6151 - protein, 5 aa, synthetic construct
SKPFR

SEQ ID NO: 6152 - protein, 5 aa, synthetic construct
SLAWN

SEQ ID NO: 6153 - protein, 5 aa, synthetic construct
SKRSY

SEQ ID NO: 6154 - protein, 5 aa, synthetic construct
WSYQN

SEQ ID NO: 6155 - protein, 5 aa, synthetic construct
RWLQN

SEQ ID NO: 6156 - protein, 5 aa, synthetic construct
PSCQN

SEQ ID NO: 6157 - protein, 5 aa, synthetic construct
SSWLN

SEQ ID NO: 6158 - protein, 5 aa, synthetic construct
SKRRA

SEQ ID NO: 6159 - protein, 5 aa, synthetic construct
SKAQT

SEQ ID NO: 6160 - protein, 5 aa, synthetic construct
SKGCT

SEQ ID NO: 6161 - protein, 5 aa, synthetic construct
VPWQN

SEQ ID NO: 6162 - protein, 5 aa, synthetic construct
SKRYT

SEQ ID NO: 6163 - protein, 5 aa, synthetic construct
SGCQN

SEQ ID NO: 6164 - protein, 5 aa, synthetic construct
SFTPN

SEQ ID NO: 6165 - protein, 5 aa, synthetic construct
STTCN

SEQ ID NO: 6166 - protein, 5 aa, synthetic construct
SKARM

SEQ ID NO: 6167 - protein, 5 aa, synthetic construct
PKRQN

SEQ ID NO: 6168 - protein, 5 aa, synthetic construct
SKCFL

SEQ ID NO: 6169 - protein, 5 aa, synthetic construct
WVPQN

SEQ ID NO: 6170 - protein, 5 aa, synthetic construct
SFWSN

SEQ ID NO: 6171 - protein, 5 aa, synthetic construct
SKFKN

SEQ ID NO: 6172 - protein, 5 aa, synthetic construct
RIKQN

SEQ ID NO: 6173 - protein, 5 aa, synthetic construct
SKAPR

SEQ ID NO: 6174 - protein, 5 aa, synthetic construct
SFRYN

SEQ ID NO: 6175 - protein, 5 aa, synthetic construct
SKMIC

SEQ ID NO: 6176 - protein, 5 aa, synthetic construct
LRWQN

SEQ ID NO: 6177 - protein, 5 aa, synthetic construct
LPTQN

SEQ ID NO: 6178 - protein, 5 aa, synthetic construct
SKWKS

SEQ ID NO: 6179 - protein, 5 aa, synthetic construct
SYMRN

SEQ ID NO: 6180 - protein, 5 aa, synthetic construct
SKAAR

SEQ ID NO: 6181 - protein, 5 aa, synthetic construct
LLCQN

SEQ ID NO: 6182 - protein, 5 aa, synthetic construct
RCCQN

SEQ ID NO: 6183 - protein, 5 aa, synthetic construct
LCVQN

SEQ ID NO: 6184 - protein, 5 aa, synthetic construct
SKLTR

SEQ ID NO: 6185 - protein, 5 aa, synthetic construct
SKLCT

SEQ ID NO: 6186 - protein, 5 aa, synthetic construct
SKIRG

SEQ ID NO: 6187 - protein, 5 aa, synthetic construct
SYLVN

SEQ ID NO: 6188 - protein, 5 aa, synthetic construct
QGCQN

SEQ ID NO: 6189 - protein, 5 aa, synthetic construct
MAFQN

SEQ ID NO: 6190 - protein, 5 aa, synthetic construct
SKACQ

SEQ ID NO: 6191 - protein, 5 aa, synthetic construct
SKWGL

SEQ ID NO: 6192 - protein, 5 aa, synthetic construct
SKILR

SEQ ID NO: 6193 - protein, 5 aa, synthetic construct
SFQIN

SEQ ID NO: 6194 - protein, 5 aa, synthetic construct
SKACI

SEQ ID NO: 6195 - protein, 5 aa, synthetic construct
SKALR

SEQ ID NO: 6196 - protein, 5 aa, synthetic construct
SKAHA

SEQ ID NO: 6197 - protein, 5 aa, synthetic construct
SLCLN

SEQ ID NO: 6198 - protein, 5 aa, synthetic construct
SKAFV

SEQ ID NO: 6199 - protein, 5 aa, synthetic construct
RPWQN

SEQ ID NO: 6200 - protein, 5 aa, synthetic construct
RPRQN

SEQ ID NO: 6201 - protein, 5 aa, synthetic construct
SCPQN

SEQ ID NO: 6202 - protein, 5 aa, synthetic construct
SKAQF

SEQ ID NO: 6203 - protein, 5 aa, synthetic construct
SVRYN

SEQ ID NO: 6204 - protein, 5 aa, synthetic construct
SVRCN

SEQ ID NO: 6205 - protein, 5 aa, synthetic construct
SKMPC

SEQ ID NO: 6206 - protein, 5 aa, synthetic construct
SKKTS

SEQ ID NO: 6207 - protein, 5 aa, synthetic construct
SLPYN

SEQ ID NO: 6208 - protein, 5 aa, synthetic construct
VYHQN

SEQ ID NO: 6209 - protein, 5 aa, synthetic construct
SKAQS

SEQ ID NO: 6210 - protein, 5 aa, synthetic construct
SYTRN

SEQ ID NO: 6211 - protein, 5 aa, synthetic construct
LVYQN

SEQ ID NO: 6212 - protein, 5 aa, synthetic construct
YRYQN

SEQ ID NO: 6213 - protein, 5 aa, synthetic construct
SWLKN

SEQ ID NO: 6214 - protein, 5 aa, synthetic construct
SKAQM

SEQ ID NO: 6215 - protein, 5 aa, synthetic construct
CPAQN

SEQ ID NO: 6216 - protein, 5 aa, synthetic construct
SMCTN

SEQ ID NO: 6217 - protein, 5 aa, synthetic construct
SPPDN

SEQ ID NO: 6218 - protein, 5 aa, synthetic construct
SKRNY

SEQ ID NO: 6219 - protein, 5 aa, synthetic construct
RWTQN

SEQ ID NO: 6220 - protein, 5 aa, synthetic construct
SKACR

SEQ ID NO: 6221 - protein, 5 aa, synthetic construct
PRKQN

SEQ ID NO: 6222 - protein, 5 aa, synthetic construct
SKCSV

SEQ ID NO: 6223 - protein, 5 aa, synthetic construct
SKARI

SEQ ID NO: 6224 - protein, 5 aa, synthetic construct
PFVQN

SEQ ID NO: 6225 - protein, 5 aa, synthetic construct
SKLPK

SEQ ID NO: 6226 - protein, 5 aa, synthetic construct
SKSEQ

SEQ ID NO: 6227 - protein, 5 aa, synthetic construct
WVAQN

SEQ ID NO: 6228 - protein, 5 aa, synthetic construct
SLYQN

SEQ ID NO: 6229 - protein, 5 aa, synthetic construct
SKVRM

SEQ ID NO: 6230 - protein, 5 aa, synthetic construct
CALQN

SEQ ID NO: 6231 - protein, 5 aa, synthetic construct
SSCTN

SEQ ID NO: 6232 - protein, 5 aa, synthetic construct
SKNSR

SEQ ID NO: 6233 - protein, 5 aa, synthetic construct
SKRKR

SEQ ID NO: 6234 - protein, 5 aa, synthetic construct
LCTQN

SEQ ID NO: 6235 - protein, 5 aa, synthetic construct
STCLN

SEQ ID NO: 6236 - protein, 5 aa, synthetic construct
SYARN

SEQ ID NO: 6237 - protein, 5 aa, synthetic construct
SKQRP

SEQ ID NO: 6238 - protein, 5 aa, synthetic construct
SKRVV

SEQ ID NO: 6239 - protein, 5 aa, synthetic construct
KSGQN

SEQ ID NO: 6240 - protein, 5 aa, synthetic construct
SYYSN

SEQ ID NO: 6241 - protein, 5 aa, synthetic construct
SLTCN

SEQ ID NO: 6242 - protein, 5 aa, synthetic construct
SCQSN

SEQ ID NO: 6243 - protein, 5 aa, synthetic construct
SKAKG

SEQ ID NO: 6244 - protein, 5 aa, synthetic construct
SKPQN

SEQ ID NO: 6245 - protein, 5 aa, synthetic construct
FPFQN

SEQ ID NO: 6246 - protein, 5 aa, synthetic construct
SKCTS

SEQ ID NO: 6247 - protein, 5 aa, synthetic construct
SVFEN

SEQ ID NO: 6248 - protein, 5 aa, synthetic construct
SKAKK

SEQ ID NO: 6249 - protein, 5 aa, synthetic construct
GRYQN

SEQ ID NO: 6250 - protein, 11 aa, synthetic construct
GSGSPHSKAQA

SEQ ID NO: 6251 - protein, 11 aa, synthetic construct
GSGSPHSKAQN

SEQ ID NO: 6252 - protein, 11 aa, synthetic construct
GSGSPHSMYMN

SEQ ID NO: 6253 - protein, 11 aa, synthetic construct
GSGSPHSKAFY

SEQ ID NO: 6254 - protein, 11 aa, synthetic construct
GSGSPHSKLKR

SEQ ID NO: 6255 - protein, 11 aa, synthetic construct
GSGSPHSKRHR

SEQ ID NO: 6256 - protein, 11 aa, synthetic construct
GSGSPHSKAQK

SEQ ID NO: 6257 - protein, 11 aa, synthetic construct
GSGSPHSKWRL

SEQ ID NO: 6258 - protein, 11 aa, synthetic construct
GSGSPHSRCRN

SEQ ID NO: 6259 - protein, 11 aa, synthetic construct
GSGSPHSFTCN

SEQ ID NO: 6260 - protein, 11 aa, synthetic construct
GSGSPHSKFFI

SEQ ID NO: 6261 - protein, 11 aa, synthetic construct
GSGSPHSKAQY

SEQ ID NO: 6262 - protein, 11 aa, synthetic construct
GSGSPHIVWQN

SEQ ID NO: 6263 - protein, 11 aa, synthetic construct
GSGSPHSKYFM

SEQ ID NO: 6264 - protein, 11 aa, synthetic construct
GSGSPHSKARQ

SEQ ID NO: 6265 - protein, 11 aa, synthetic construct
GSGSPHSCHQN

SEQ ID NO: 6266 - protein, 11 aa, synthetic construct
GSGSPHFPWQN

SEQ ID NO: 6267 - protein, 11 aa, synthetic construct
GSGSPHSKIRR

SEQ ID NO: 6268 - protein, 11 aa, synthetic construct
GSGSPHVYYQN

SEQ ID NO: 6269 - protein, 11 aa, synthetic construct
GSGSPHSLYWN

SEQ ID NO: 6270 - protein, 11 aa, synthetic construct
GSGSPHSKPKR

SEQ ID NO: 6271 - protein, 11 aa, synthetic construct
GSGSPHSKAFS

SEQ ID NO: 6272 - protein, 11 aa, synthetic construct
GSGSPHSRFWN

SEQ ID NO: 6273 - protein, 11 aa, synthetic construct
GSGSPHSKAQC

SEQ ID NO: 6274 - protein, 11 aa, synthetic construct
GSGSPHSRMRN

SEQ ID NO: 6275 - protein, 11 aa, synthetic construct
GSGSPHSVKKN

SEQ ID NO: 6276 - protein, 11 aa, synthetic construct
GSGSPHSWAPN

SEQ ID NO: 6277 - protein, 11 aa, synthetic construct
GSGSPHSLWKN

SEQ ID NO: 6278 - protein, 11 aa, synthetic construct
GSGSPHSKARW

SEQ ID NO: 6279 - protein, 11 aa, synthetic construct
GSGSPHSFRPN

SEQ ID NO: 6280 - protein, 11 aa, synthetic construct
GSGSPHSKKVF

SEQ ID NO: 6281 - protein, 11 aa, synthetic construct
GSGSPHSYAFN

SEQ ID NO: 6282 - protein, 11 aa, synthetic construct
GSGSPHSKACS

SEQ ID NO: 6283 - protein, 11 aa, synthetic construct
GSGSPHSKRLW

SEQ ID NO: 6284 - protein, 11 aa, synthetic construct
GSGSPHSCSRN

SEQ ID NO: 6285 - protein, 11 aa, synthetic construct
GSGSPHSRCPN

SEQ ID NO: 6286 - protein, 11 aa, synthetic construct
GSGSPHSGACN

SEQ ID NO: 6287 - protein, 11 aa, synthetic construct
GSGSPHSKFRQ

SEQ ID NO: 6288 - protein, 11 aa, synthetic construct
GSGSPHSFPFN

SEQ ID NO: 6289 - protein, 11 aa, synthetic construct
GSGSPHSFFGN

SEQ ID NO: 6290 - protein, 11 aa, synthetic construct
GSGSPHSMCQN

SEQ ID NO: 6291 - protein, 11 aa, synthetic construct
GSGSPHSKLFW

SEQ ID NO: 6292 - protein, 11 aa, synthetic construct
GSGSPHSKTRK

SEQ ID NO: 6293 - protein, 11 aa, synthetic construct
GSGSPHSGKRN

SEQ ID NO: 6294 - protein, 11 aa, synthetic construct
GSGSPHFYRQN

SEQ ID NO: 6295 - protein, 11 aa, synthetic construct
GSGSPHCRVQN

SEQ ID NO: 6296 - protein, 11 aa, synthetic construct
GSGSPHYGIQN

SEQ ID NO: 6297 - protein, 11 aa, synthetic construct
GSGSPHSKAQR

SEQ ID NO: 6298 - protein, 11 aa, synthetic construct
GSGSPHVNCQN

SEQ ID NO: 6299 - protein, 11 aa, synthetic construct
GSGSPHSKPFR

SEQ ID NO: 6300 - protein, 11 aa, synthetic construct
GSGSPHSLAWN

SEQ ID NO: 6301 - protein, 11 aa, synthetic construct
GSGSPHSKRSY

SEQ ID NO: 6302 - protein, 11 aa, synthetic construct
GSGSPHWSYQN

SEQ ID NO: 6303 - protein, 11 aa, synthetic construct
GSGSPHRWLQN

SEQ ID NO: 6304 - protein, 11 aa, synthetic construct
GSGSPHPSCQN

SEQ ID NO: 6305 - protein, 11 aa, synthetic construct
GSGSPHSSWLN

SEQ ID NO: 6306 - protein, 11 aa, synthetic construct
GSGSPHSKRRA

SEQ ID NO: 6307 - protein, 11 aa, synthetic construct
GSGSPHSKAQT

SEQ ID NO: 6308 - protein, 11 aa, synthetic construct
GSGSPHSKGCT

SEQ ID NO: 6309 - protein, 11 aa, synthetic construct
GSGSPHVPWQN

SEQ ID NO: 6310 - protein, 11 aa, synthetic construct
GSGSPHSKRYT

SEQ ID NO: 6311 - protein, 11 aa, synthetic construct
GSGSPHSGCQN

SEQ ID NO: 6312 - protein, 11 aa, synthetic construct
GSGSPHSFTPN

SEQ ID NO: 6313 - protein, 11 aa, synthetic construct
GSGSPHSTTCN

SEQ ID NO: 6314 - protein, 11 aa, synthetic construct
GSGSPHSKARM

SEQ ID NO: 6315 - protein, 11 aa, synthetic construct
GSGSPHPKRQN

SEQ ID NO: 6316 - protein, 11 aa, synthetic construct
GSGSPHSKCFL

SEQ ID NO: 6317 - protein, 11 aa, synthetic construct
GSGSPHWVPQN

SEQ ID NO: 6318 - protein, 11 aa, synthetic construct
GSGSPHSFWSN

SEQ ID NO: 6319 - protein, 11 aa, synthetic construct
GSGSPHSKFKN

SEQ ID NO: 6320 - protein, 11 aa, synthetic construct
GSGSPHRIKQN

SEQ ID NO: 6321 - protein, 11 aa, synthetic construct
GSGSPHSKAPR

SEQ ID NO: 6322 - protein, 11 aa, synthetic construct
GSGSPHSFRYN

SEQ ID NO: 6323 - protein, 11 aa, synthetic construct
GSGSPHSKMIC

SEQ ID NO: 6324 - protein, 11 aa, synthetic construct
GSGSPHLRWQN

SEQ ID NO: 6325 - protein, 11 aa, synthetic construct
GSGSPHLPTQN

SEQ ID NO: 6326 - protein, 11 aa, synthetic construct
GSGSPHSKWKS

SEQ ID NO: 6327 - protein, 11 aa, synthetic construct
GSGSPHSYMRN

SEQ ID NO: 6328 - protein, 11 aa, synthetic construct
GSGSPHSKAAR

SEQ ID NO: 6329 - protein, 11 aa, synthetic construct
GSGSPHLLCQN

SEQ ID NO: 6330 - protein, 11 aa, synthetic construct
GSGSPHRCCQN

SEQ ID NO: 6331 - protein, 11 aa, synthetic construct
GSGSPHLCVQN

SEQ ID NO: 6332 - protein, 11 aa, synthetic construct
GSGSPHSKLTR

SEQ ID NO: 6333 - protein, 11 aa, synthetic construct
GSGSPHSKLCT

SEQ ID NO: 6334 - protein, 11 aa, synthetic construct
GSGSPHSKIRG

SEQ ID NO: 6335 - protein, 11 aa, synthetic construct
GSGSPHSYLVN

SEQ ID NO: 6336 - protein, 11 aa, synthetic construct
GSGSPHQGCQN

SEQ ID NO: 6337 - protein, 11 aa, synthetic construct
GSGSPHMAFQN

SEQ ID NO: 6338 - protein, 11 aa, synthetic construct
GSGSPHSKACQ

SEQ ID NO: 6339 - protein, 11 aa, synthetic construct
GSGSPHSKWGL

SEQ ID NO: 6340 - protein, 11 aa, synthetic construct
GSGSPHSKILR

SEQ ID NO: 6341 - protein, 11 aa, synthetic construct
GSGSPHSFQIN

SEQ ID NO: 6342 - protein, 11 aa, synthetic construct
GSGSPHSKACI

SEQ ID NO: 6343 - protein, 11 aa, synthetic construct
GSGSPHSKALR

SEQ ID NO: 6344 - protein, 11 aa, synthetic construct
GSGSPHSKAHA

SEQ ID NO: 6345 - protein, 11 aa, synthetic construct
GSGSPHSLCLN

SEQ ID NO: 6346 - protein, 11 aa, synthetic construct
GSGSPHSKAFV

SEQ ID NO: 6347 - protein, 11 aa, synthetic construct
GSGSPHRPWQN

SEQ ID NO: 6348 - protein, 11 aa, synthetic construct
GSGSPHRPRQN

SEQ ID NO: 6349 - protein, 11 aa, synthetic construct
GSGSPHSCPQN

SEQ ID NO: 6350 - protein, 11 aa, synthetic construct
GSGSPHSKAQF

SEQ ID NO: 6351 - protein, 11 aa, synthetic construct
GSGSPHSVRYN

SEQ ID NO: 6352 - protein, 11 aa, synthetic construct
GSGSPHSVRCN

SEQ ID NO: 6353 - protein, 11 aa, synthetic construct
GSGSPHSKMPC

SEQ ID NO: 6354 - protein, 11 aa, synthetic construct
GSGSPHSKKTS

SEQ ID NO: 6355 - protein, 11 aa, synthetic construct
GSGSPHSLPYN

SEQ ID NO: 6356 - protein, 11 aa, synthetic construct
GSGSPHVYHQN

SEQ ID NO: 6357 - protein, 11 aa, synthetic construct
GSGSPHSKAQS

SEQ ID NO: 6358 - protein, 11 aa, synthetic construct
GSGSPHSYTRN

SEQ ID NO: 6359 - protein, 11 aa, synthetic construct
GSGSPHLVYQN

SEQ ID NO: 6360 - protein, 11 aa, synthetic construct
GSGSPHYRYQN

SEQ ID NO: 6361 - protein, 11 aa, synthetic construct
GSGSPHSWLKN

SEQ ID NO: 6362 - protein, 11 aa, synthetic construct
GSGSPHSKAQM

SEQ ID NO: 6363 - protein, 11 aa, synthetic construct
GSGSPHCPAQN

SEQ ID NO: 6364 - protein, 11 aa, synthetic construct
GSGSPHSMCTN

SEQ ID NO: 6365 - protein, 11 aa, synthetic construct
GSGSPHSPPDN

SEQ ID NO: 6366 - protein, 11 aa, synthetic construct
GSGSPHSKRNY

SEQ ID NO: 6367 - protein, 11 aa, synthetic construct
GSGSPHRWTQN

SEQ ID NO: 6368 - protein, 11 aa, synthetic construct
GSGSPHSKACR

SEQ ID NO: 6369 - protein, 11 aa, synthetic construct
GSGSPHPRKQN

SEQ ID NO: 6370 - protein, 11 aa, synthetic construct
GSGSPHSKCSV

SEQ ID NO: 6371 - protein, 11 aa, synthetic construct
GSGSPHSKARI

SEQ ID NO: 6372 - protein, 11 aa, synthetic construct
GSGSPHPFVQN

SEQ ID NO: 6373 - protein, 11 aa, synthetic construct
GSGSPHSKLPK

SEQ ID NO: 6374 - protein, 11 aa, synthetic construct
GSGSPHSKSEQ

SEQ ID NO: 6375 - protein, 11 aa, synthetic construct
GSGSPHWVAQN

SEQ ID NO: 6376 - protein, 11 aa, synthetic construct
GSGSPHSLYQN

SEQ ID NO: 6377 - protein, 11 aa, synthetic construct
GSGSPHSKVRM

SEQ ID NO: 6378 - protein, 11 aa, synthetic construct
GSGSPHCALQN

SEQ ID NO: 6379 - protein, 11 aa, synthetic construct
GSGSPHSSCTN

SEQ ID NO: 6380 - protein, 11 aa, synthetic construct
GSGSPHSKNSR

SEQ ID NO: 6381 - protein, 11 aa, synthetic construct
GSGSPHSKRKR

SEQ ID NO: 6382 - protein, 11 aa, synthetic construct
GSGSPHLCTQN

SEQ ID NO: 6383 - protein, 11 aa, synthetic construct
GSGSPHSTCLN

SEQ ID NO: 6384 - protein, 11 aa, synthetic construct
GSGSPHSYARN

SEQ ID NO: 6385 - protein, 11 aa, synthetic construct
GSGSPHSKQRP

SEQ ID NO: 6386 - protein, 11 aa, synthetic construct
GSGSPHSKRVV

SEQ ID NO: 6387 - protein, 11 aa, synthetic construct
GSGSPHKSGQN

SEQ ID NO: 6388 - protein, 11 aa, synthetic construct
GSGSPHSYYSN

SEQ ID NO: 6389 - protein, 11 aa, synthetic construct
GSGSPHSLTCN

SEQ ID NO: 6390 - protein, 11 aa, synthetic construct
GSGSPHSCQSN

SEQ ID NO: 6391 - protein, 11 aa, synthetic construct
GSGSPHSKAKG

SEQ ID NO: 6392 - protein, 11 aa, synthetic construct
GSGSPHSKPQN

SEQ ID NO: 6393 - protein, 11 aa, synthetic construct
GSGSPHFPFQN

SEQ ID NO: 6394 - protein, 11 aa, synthetic construct
GSGSPHSKCTS

SEQ ID NO: 6395 - protein, 11 aa, synthetic construct
GSGSPHSVFEN

SEQ ID NO: 6396 - protein, 11 aa, synthetic construct
GSGSPHSKAKK

SEQ ID NO: 6397 - protein, 11 aa, synthetic construct
GSGSPHGRYQN

SEQ ID NO: 6398 - protein, 4 aa, synthetic construct
SPHK

SEQ ID NO: 6399 - protein, 11 aa, synthetic construct
ERVSGSPHSKA

SEQ ID NO: 6400 - protein, 12 aa, synthetic construct
AEIGHDSPHKSG

SEQ ID NO: 6401 - protein, 11 aa, synthetic construct
EKMSGSPHSKA

SEQ ID NO: 6402 - protein, 11 aa, synthetic construct
HDSPHSKAQNL

SEQ ID NO: 6403 - protein, 11 aa, synthetic construct
VNGHDSPHSKA

SEQ ID NO: 6404 - protein, 27 aa, synthetic construct
KTINGSGQNQQTLKFSVAGPSNMAVQG

SEQ ID NO: 6405 - protein, 12 aa, synthetic construct
KTINGSGQNQQT

SEQ ID NO: 6406 - protein, 8 aa, synthetic construct
GSGQNQQT

SEQ ID NO: 6407 - protein, 9 aa, synthetic construct
  VARIANT 1: note = Any amino acid
  VARIANT 7: note = Any amino acid
  VARIANT 9: note = Any amino acid
XSGSPHXKX

SEQ ID NO: 6408 - protein, 9 aa, synthetic construct
  VARIANT 1: note = Any amino acid
  VARIANT 2: note = Any amino acid other than S
  VARIANT 3: note = Any amino acid other than G
  VARIANT 8: note = Any amino acid
  VARIANT 9: note = Any amino acid
XXXSPHKXX

SEQ ID NO: 6409 - protein, 742 aa, synthetic construct
MAADGYLPDWLEDNLSEGIREWWALKPGAPQPKANQQHQDNARGLVLPGYKYLGPGNGLDKGEPVNAADAAALEHDKAYDQQLKAGDNPYLKYNHADAEFQERLKEDTSFGGNLGRAVFQAKKRLLEPLGLVEEAAKTAPGKKRPVEQSPQEPDSSAGIGKSGAQPAKKRLNFGQTGDTESVPDPQPIGEPPAAPSGVGSLTMASGGGAPVADNNEGADGVGSSSGNWHCDSQWLGDRVITTSTRTWALPTYNNHLYKQISNSTSGGSSNDNAYFGYSTPWGYFDFNRFHCHFSPRDWQRLINNNWGFRPKRLNFKLFNIQVKEVTDNNGVKTIANNLTSTVQVFTDSDYQLPYVLGSAHEGCLPPFPADVFMIPQYGYLTLNDGSQAVGRSSFYCLEYFPSQMLRTGNNFQFSYEFENVPFHSSYAHSQSLDRLMNPLIDQYLYYLSKAENGSGSPHSKAQNQQTLKFSVAGPSNMAVQGRNYIPGPSYRQQRVSTTVTQNNNSEFAWPGASSWALNGRNSLMNPGPAMASHKEGEDRFFPLSGSLIFGKQGTGRDNVDADKVMITNEEEIKTTNPVATESYGQVATNHQSAQAQAQTGWVQNQGILPGMVWQDRDVYLQGPIWAKIPHTDGNFHPSPLMGGFGMKHPPPQILIKNTPVPADPPTAFNKDKLNSFITQYSTGQVSVEIEWELQKENSKRWNPEIQYTSNYYKSNNVEFAVNTEGVYSEPRPIGTRYLTRNL

SEQ ID NO: 6410 - protein, 742 aa, synthetic construct
MAADGYLPDWLEDNLSEGIREWWALKPGAPQPKANQQHQDNARGLVLPGYKYLGPGNGLDKGEPVNAADAAALEHDKAYDQQLKAGDNPYLKYNHADAEFQERLKEDTSFGGNLGRAVFQAKKRLLEPLGLVEEAAKTAPGKKRPVEQSPQEPDSSAGIGKSGAQPAKKRLNFGQTGDTESVPDPQPIGEPPAAPSGVGSLTMASGGGAPVADNNEGADGVGSSSGNWHCDSQWLGDRVITTSTRTWALPTYNNHLYKQISNSTSGGSSNDNAYFGYSTPWGYFDFNRFHCHFSPRDWQRLINNNWGFRPKRLNFKLFNIQVKEVTDNNGVKTIANNLTSTVQVFTDSDYQLPYVLGSAHEGCLPPFPADVFMIPQYGYLTLNDGSQAVGRSSFYCLEYFPSQMLRTGNNFQFSYEFENVPFHSSYAHSQSLDRLMNPLIDQYLYYLSKTINGSGSPHKSGQNQQPLKFSVAGPSNMAVQGRNYIPGPSYRQQRVSTTVTQNNNSEFAWPGASSWALNGRNSLMNPGPAMASHKEGEDRFFPLSGSLIFGKQGTGRDNVDADKVMITNEEEIKTTNPVATESYGQVATNHQSAQAQAQTGWVQNQGILPGMVWQDRDVYLQGPIWAKIPHTDGNFHPSPLMGGFGMKHPPPQILIKNTPVPADPPTAFNKDKLNSFITQYSTGQVSVEIEWELQKENSKRWNPEIQYTSNYYKSNNVEFAVNTEGVYSEPRPIGTRYLTRNL

SEQ ID NO: 6411 - protein, 742 aa, synthetic construct
MAADGYLPDWLEDNLSEGIREWWALKPGAPQPKANQQHQDNARGLVLPGYKYLGPGNGLDKGEPVNAADAAALEHDKAYDQQLKAGDNPYLKYNHADAEFQERLKEDTSFGGNLGRAVFQAKKRLLEPLGLVEEAAKTAPGKKRPVEQSPQEPDSSAGIGKSGAQPAKKRLNFGQTGDTESVPDPQPIGEPPAAPSGVGSLTMASGGGAPVADNNEGADGVGSSSGNWHCDSQWLGDRVITTSTRTWALPTYNNHLYKQISNSTSGGSSNDNAYFGYSTPWGYFDFNRFHCHFSPRDWQRLINNNWGFRPKRLNFKLFNIQVKEVTDNNGVKTIANNLTSTVQVFTDSDYQLPYVLGSAHEGCLPPFPADVFMIPQYGYLTLNDGSQAVGRSSFYCLEYFPSQMLRTGNNFQFSYEFENVPFHSSYAHSQSLDRLMNPLIDQYLYYLSKTINGSGSPHSKAQNQQTLKFSVAGPSNMAVQGRNYIPGPSYRQQRVSTTVTQNNNSEFAWPGASSWALNGRNSLMNPGPAMASHKEGEDRFFPLSGSLIFGKQGTGRDNVDADKVMITNEEEIKTTNPVATESYGQVATNRQTALQLAQTGWVQNQGILPGMVWQDRDVYLQGPIWAKIPHTDGNFHPSPLMGGFGMKHPPPQILIKNTPVPADPPTAFNKDKLNSFITQYSTGQVSVEIEWELQKENSKRWNPEIQYTSNYYKSNNVEFAVNTEGVYSEPRPIGTRYLTRNL

SEQ ID NO: 6412 - protein, 742 aa, synthetic construct
MAADGYLPDWLEDNLSEGIREWWALKPGAPQPKANQQHQDNARGLVLPGYKYLGPGNGLDKGEPVNAADAAALEHDKAYDQQLKAGDNPYLKYNHADAEFQERLKEDTSFGGNLGRAVFQAKKRLLEPLGLVEEAAKTAPGKKRPVEQSPQEPDSSAGIGKSGAQPAKKRLNFGQTGDTESVPDPQPIGEPPAAPSGVGSLTMASGGGAPVADNNEGADGVGSSSGNWHCDSQWLGDRVITTSTRTWALPTYNNHLYKQISNSTSGGSSNDNAYFGYSTPWGYFDFNRFHCHFSPRDWQRLINNNWGFRPKRLNFKLFNIQVKEVTDNNGVKTIANNLTSTVQVFTDSDYQLPYVLGSAHEGCLPPFPADVFMIPQYGYLTLNDGSQAVGRSSFYCLEYFPSQMLRTGNNFQFSYEFENVPFHSSYAHSQSLDRLMNPLIDQYLYYLSKTINGHDSPHKSGQNQQTLKFSVAGPSNMAVQGRNYIPGPSYRQQRVSTTVTQNNNSEFAWPGASSWALNGRNSLMNPGPAMASHKEGEDRFFPLSGSLIFGKQGTGRDNVDADKVMITNEEEIKTTNPVATESYGQVATNRQTALQLAQTGWVQNQGILPGMVWQDRDVYLQGPIWAKIPHTDGNFHPSPLMGGFGMKHPPPQILIKNTPVPADPPTAFNKDKLNSFITQYSTGQVSVEIEWELQKENSKRWNPEIQYTSNYYKSNNVEFAVNTEGVYSEPRPIGTRYLTRNL

SEQ ID NO: 6413 - protein, 742 aa, synthetic construct
MAADGYLPDWLEDNLSEGIREWWALKPGAPQPKANQQHQDNARGLVLPGYKYLGPGNGLDKGEPVNAADAAALEHDKAYDQQLKAGDNPYLKYNHADAEFQERLKEDTSFGGNLGRAVFQAKKRLLEPLGLVEEAAKTAPGKKRPVEQSPQEPDSSAGIGKSGAQPAKKRLNFGQTGDTESVPDPQPIGEPPAAPSGVGSLTMASGGGAPVADNNEGADGVGSSSGNWHCDSQWLGDRVITTSTRTWALPTYNNHLYKQISNSTSGGSSNDNAYFGYSTPWGYFDFNRFHCHFSPRDWQRLINNNWGFRPKRLNFKLFNIQVKEVTDNNGVKTIANNLTSTVQVFTDSDYQLPYVLGSAHEGCLPPFPADVFMIPQYGYLTLNDGSQAVGRSSFYCLEYFPSQMLRTGNNFQFSYEFENVPFHSSYAHSQSLDRLMNPLIDQYLYYLSKTINGHDSPHKSGQNQQTLKFSVAGPSNMAVQGRNYIPGPSYRQQRVSTTVTQNNNSEFAWPGASSWALNGRNSLMNPGPAMASHKEGEDRFFPLSGSLIFGKQGTGRDNVDADKVMITNEEEIKTTNPVATESYGQVATNHQSAKAQSSAGWVQNQGILPGMVWQDRDVYLQGPIWAKIPHTDGNFHPSPLMGGFGMKHPPPQILIKNTPVPADPPTAFNKDKLNSFITQYSTGQVSVEIEWELQKENSKRWNPEIQYTSNYYKSNNVEFAVNTEGVYSEPRPIGTRYLTRNL

SEQ ID NO: 6414 - protein, 736 aa, synthetic construct
MAADGYLPDWLEDNLSEGIREWWALKPGAPQPKANQQHQDNARGLVLPGYKYLGPGNGLDKGEPVNAADAAALEHDKAYDQQLKAGDNPYLKYNHADAEFQERLKEDTSFGGNLGRAVFQAKKRLLEPLGLVEEAAKTAPGKKRPVEQSPQEPDSSAGIGKSGAQPAKKRLNFGQTGDTESVPDPQPIGEPPAAPSGVGSLTMASGGGAPVADNNEGADGVGSSSGNWHCDSQWLGDRVITTSTRTWALPTYNNHLYKQISNSTSGGSSNDNAYFGYSTPWGYFDFNRFHCHFSPRDWQRLINNNWGFRPKRLNFKLFNIQVKEVTDNNGVKTIANNLTSTVQVFTDSDYQLPYVLGSAHEGCLPPFPADVFMIPQYGYLTLNDGSQAVGRSSFYCLEYFPSQMLRTGNNFQFSYEFENVPFHSSYAHSQSLDRLMNPLIDQYLYYLSKTINGSGQNQQTLKFSVAGPSNMAVQGRNYIPGPSYRQQRVSTTVTQNNNSEFAWPGASSWALNGRNSLMNPGPAMASHKEGEDRFFPLSGSLIFGKQGTGRDNVDADKVMITNEEEIKTTNPVATESYGQVATNRQTALQLAQTGWVQNQGILPGMVWQDRDVYLQGPIWAKIPHTDGNFHPSPLMGGFGMKHPPPQILIKNTPVPADPPTAFNKDKLNSFITQYSTGQVSVEIEWELQKENSKRWNPEIQYTSNYYKSNNVEFAVNTEGVYSEPRPIGTRYLTRNL

SEQ ID NO: 6415 - DNA, 2226 bp, synthetic construct
  source 1..2226: mol_type = other DNA
atggctgccgatggttatcttccagattggctcgaggacaaccttagtgaaggaattcgcgagtggtgggctttgaaacctggagcccctcaacccaaggcaaatcaacaacatcaagacaacgctcgaggtcttgtgcttccgggttacaaataccttggacccggcaacggactcgacaagggggagccggtcaacgcagcagacgcggcggccctcgagcacgacaaggcctacgaccagcagctcaaggccggagacaacccgtacctcaagtacaaccacgccgacgccgagttccaggagcggctcaaagaagatacgtcttttgggggcaacctcgggcgagcagtcttccaggccaaaaagaggcttcttgaacctcttggtctggttgaggaagcggctaagacggctcctggaaagaagaggcctgtagagcagtctcctcaggaaccggactcctccgcgggtattggcaaatcgggtgcacagcccgctaaaaagagactcaatttcggtcagactggcgacacagagtcagtcccagaccctcaaccaatcggagaacctcccgcagccccctcaggtgtgggatctcttacaatggcttcaggtggtggcgcaccagtggcagacaataacgaaggtgccgatggagtgggtagttcctcgggaaattggcattgcgattcccaatggctgggggacagagtcatcaccaccagcacccgaacctgggccctgcccacctacaacaatcacctctacaagcaaatctccaacagcacatctggaggatcttcaaatgacaacgcctacttcggctacagcaccccctgggggtattttgacttcaacagattccactgccacttctcaccacgtgactggcagcgactcatcaacaacaactggggattccggcctaagcgactcaacttcaagctcttcaacattcaggtcaaagaggttacggacaacaatggagtcaagaccatcgccaataaccttaccagcacggtccaggtcttcacggactcagactatcagctcccgtacgtgctcgggtcggctcacgagggctgcctcccgccgttcccagcggacgttttcatgattcctcagtacgggtatctgacgcttaatgatggaagccaggccgtgggtcgttcgtccttttactgcctggaatatttcccgtcgcaaatgctaagaacgggtaacaacttccagttcagctacgagtttgagaacgtacctttccatagcagctacgctcacagccaaagcctggaccgactaatgaatccactcatcgaccaatacttgtattacttgagtaaaacaattaacggaagcggaagcccacacagcaaagcacaaaaccaacagaccttgaagttttcggtagctggtcctagcaacatggctgtccagggaagaaactacatacctggacccagctaccgacaacaacgtgtctcaaccactgtgactcaaaacaacaacagcgaatttgcttggcctggagcttcttcttgggctctcaatggacgtaatagcttgatgaatcctggacctgctatggcgtctcataaagaaggggaggatcgtttctttcctttgtctggatctttaatttttggtaagcagggtacaggtagagacaacgtggatgcggacaaagtcatgataaccaacgaagaagaaattaaaactactaacccggtagcaacggagtcctatggacaagtggctaccaacaggcagaccgccctgcagctggcgcagaccggctgggttcaaaaccaaggaatacttccgggtatggtttggcaggacagagatgtgtacctgcaaggacccatttgggccaaaattcctcacacggacggcaactttcacccttctccgctgatgggagggtttggaatgaagcacccgcctcctcagatcctcatcaaaaacacacctgtacctgcggatcctccaacggccttcaacaaggacaagctgaactctttcatcacccagtattctactggccaagtcagcgtggagatcgagtgggagctgcagaaggaaaacagcaagcgctggaacccggagatccagtacacttccaactattacaagtctaataatgttgaatttgctgttaatactgaaggtgtatatagtgaaccccgccccattggcacccggtatttaacgaggaactta

SEQ ID NO: 6416 - DNA, 2226 bp, synthetic construct
  source 1..2226: mol_type = other DNA
atggctgccgatggttatcttccagattggctcgaggacaaccttagtgaaggaattcgcgagtggtgggctttgaaacctggagcccctcaacccaaggcaaatcaacaacatcaagacaacgctcgaggtcttgtgcttccgggttacaaataccttggacccggcaacggactcgacaagggggagccggtcaacgcagcagacgcggcggccctcgagcacgacaaggcctacgaccagcagctcaaggccggagacaacccgtacctcaagtacaaccacgccgacgccgagttccaggagcggctcaaagaagatacgtcttttgggggcaacctcgggcgagcagtcttccaggccaaaaagaggcttcttgaacctcttggtctggttgaggaagcggctaagacggctcctggaaagaagaggcctgtagagcagtctcctcaggaaccggactcctccgcgggtattggcaaatcgggtgcacagcccgctaaaaagagactcaatttcggtcagactggcgacacagagtcagtcccagaccctcaaccaatcggagaacctcccgcagccccctcaggtgtgggatctcttacaatggcttcaggtggtggcgcaccagtggcagacaataacgaaggtgccgatggagtgggtagttcctcgggaaattggcattgcgattcccaatggctgggggacagagtcatcaccaccagcacccgaacctgggccctgcccacctacaacaatcacctctacaagcaaatctccaacagcacatctggaggatcttcaaatgacaacgcctacttcggctacagcaccccctgggggtattttgacttcaacagattccactgccacttctcaccacgtgactggcagcgactcatcaacaacaactggggattccggcctaagcgactcaacttcaagctcttcaacattcaggtcaaagaggttacggacaacaatggagtcaagaccatcgccaataaccttaccagcacggtccaggtcttcacggactcagactatcagctcccgtacgtgctcgggtcggctcacgagggctgcctcccgccgttcccagcggacgttttcatgattcctcagtacgggtatctgacgcttaatgatggaagccaggccgtgggtcgttcgtccttttactgcctggaatatttcccgtcgcaaatgctaagaacgggtaacaacttccagttcagctacgagtttgagaacgtacctttccatagcagctacgctcacagccaaagcctggaccgactaatgaatccactcatcgaccaatacttgtattacttgagtaaaacaattaacggacacgacagcccacacaaaagcggacaaaaccaacagaccttgaagttttcggtagctggtcctagcaacatggctgtccagggaagaaactacatacctggacccagctaccgacaacaacgtgtctcaaccactgtgactcaaaacaacaacagcgaatttgcttggcctggagcttcttcttgggctctcaatggacgtaatagcttgatgaatcctggacctgctatggcgtctcataaagaaggggaggatcgtttctttcctttgtctggatctttaatttttggtaagcagggtacaggtagagacaacgtggatgcggacaaagtcatgataaccaacgaagaagaaattaaaactactaacccggtagcaacggagtcctatggacaagtggctaccaacaggcagaccgccctgcagctggcgcagaccggctgggttcaaaaccaaggaatacttccgggtatggtttggcaggacagagatgtgtacctgcaaggacccatttgggccaaaattcctcacacggacggcaactttcacccttctccgctgatgggagggtttggaatgaagcacccgcctcctcagatcctcatcaaaaacacacctgtacctgcggatcctccaacggccttcaacaaggacaagctgaactctttcatcacccagtattctactggccaagtcagcgtggagatcgagtgggagctgcagaaggaaaacagcaagcgctggaacccggagatccagtacacttccaactattacaagtctaataatgttgaatttgctgttaatactgaaggtgtatatagtgaaccccgccccattggcacccggtatttaacgaggaactta

SEQ ID NO: 6417 - DNA, 2211 bp, synthetic construct
  source 1..2211: mol_type = other DNA
atggctgccgatggttatcttccagattggctcgaggacaaccttagtgaaggaattcgcgagtggtgggctttgaaacctggagcccctcaacccaaggcaaatcaacaacatcaagacaacgctcgaggtcttgtgcttccgggttacaaataccttggacccggcaacggactcgacaagggggagccggtcaacgcagcagacgcggcggccctcgagcacgacaaggcctacgaccagcagctcaaggccggagacaacccgtacctcaagtacaaccacgccgacgccgagttccaggagcggctcaaagaagatacgtcttttgggggcaacctcgggcgagcagtcttccaggccaaaaagaggcttcttgaacctcttggtctggttgaggaagcggctaagacggctcctggaaagaagaggcctgtagagcagtctcctcaggaaccggactcctccgcgggtattggcaaatcgggtgcacagcccgctaaaaagagactcaatttcggtcagactggcgacacagagtcagtcccagaccctcaaccaatcggagaacctcccgcagccccctcaggtgtgggatctcttacaatggcttcaggtggtggcgcaccagtggcagacaataacgaaggtgccgatggagtgggtagttcctcgggaaattggcattgcgattcccaatggctgggggacagagtcatcaccaccagcacccgaacctgggccctgcccacctacaacaatcacctctacaagcaaatctccaacagcacatctggaggatcttcaaatgacaacgcctacttcggctacagcaccccctgggggtattttgacttcaacagattccactgccacttctcaccacgtgactggcagcgactcatcaacaacaactggggattccggcctaagcgactcaacttcaagctcttcaacattcaggtcaaagaggttacggacaacaatggagtcaagaccatcgccaataaccttaccagcacggtccaggtcttcacggactcagactatcagctcccgtacgtgctcgggtcggctcacgagggctgcctcccgccgttcccagcggacgttttcatgattcctcagtacgggtatctgacgcttaatgatggaagccaggccgtgggtcgttcgtccttttactgcctggaatatttcccgtcgcaaatgctaagaacgggtaacaacttccagttcagctacgagtttgagaacgtacctttccatagcagctacgctcacagccaaagcctggaccgactaatgaatccactcatcgaccaatacttgtactatctctcaaagactattaacggttctggacagaatcaacaaacgctaaaattcagtgtggccggacccagcaacatggctgtccagggaagaaactacatacctggacccagctaccgacaacaacgtgtctcaaccactgtgactcaaaacaacaacagcgaatttgcttggcctggagcttcttcttgggctctcaatggacgtaatagcttgatgaatcctggacctgctatggccagccacaaagaaggagaggaccgtttctttcctttgtctggatctttaatttttggcaaacaaggaactggaagagacaacgtggatgcggacaaagtcatgataaccaacgaagaagaaattaaaactactaacccggtagcaacggagtcctatggacaggtcgctaccaacaggcagaccgccctgcagctggcgcagaccggctgggttcaaaaccaaggaatacttccgggtatggtttggcaggacagagatgtgtacctgcaaggacccatttgggccaaaattcctcacacggacggcaactttcacccttctccgctgatgggagggtttggaatgaagcacccgcctcctcagatcctcatcaaaaacacacctgtacctgccgatcctccaacggccttcaacaaggacaagctgaactctttcatcacccagtattctactggccaagtcagcgtggagatcgagtgggagctgcagaaggaaaacagcaagcgctggaacccggagatccagtacacttccaactattacaagtctaataatgttgaatttgctgttaatactgaaggtgtatatagtgaaccccgccccattggcaccagatacctgactcgtaatctgtaa

SEQ ID NO: 6418 - skipped

SEQ ID NO: 6419 - protein, 7 aa, synthetic construct
RQTALQL

SEQ ID NO: 6420 - DNA, 21 bp, synthetic construct
  source 1..21: mol_type = other DNA
aggcagaccgccctgcagctg

SEQ ID NO: 6421 - protein, 13 aa, synthetic construct
ATNRQTALQLAQT

SEQ ID NO: 6422 - DNA, 39 bp, synthetic construct
  source 1..39: mol_type = other DNA
gctaccaacaggcagaccgccctgcagctggcgcagacc

SEQ ID NO: 6423 - protein, 7 aa, synthetic construct
AQAQAQT

SEQ ID NO: 6424 - protein, 4 aa, synthetic construct
AQAQ

SEQ ID NO: 6425 - protein, 20 aa, synthetic construct
VATNHQSAQAQAQTGWVQNQ

SEQ ID NO: 6426 - protein, 12 aa, synthetic construct
TNHQSAQAQAQT